(19) United States
(12) Patent Application Publication
(10) Pub. No.: US 2013/0340120 A1
(43) Pub. Date: Dec. 19, 2013

(54) Plants Having Enhanced Yield-Related Traits and Producing Methods Thereof

(71) Applicants: Marieke Louwers, Gent (BE); Christophe Reuzeau, La Chapelle Gonaguet (FR); Ana Isabel Sanz Molinero, Madrid (ES); Yves Hatzfeld, Lille (FR)

(72) Inventors: Marieke Louwers, Gent (BE); Christophe Reuzeau, La Chapelle Gonaguet (FR); Ana Isabel Sanz Molinero, Madrid (ES); Yves Hatzfeld, Lille (FR)

(73) Assignee: BASF PLANT SCIENCE COMPANY GMBH, Ludwigshafen (DE)

(21) Appl. No.: 14/001,804

(22) PCT Filed: Feb. 27, 2012
(86) PCT No.: PCT/IB12/50878

§ 371 Date: Aug. 27, 2013

Related U.S. Application Data
(60) Provisional application No. 61/447,127, filed on Feb. 28, 2011.
(60) Provisional application No. 61/478,068, filed on Apr. 22, 2011.
(60) Provisional application No. 61/447,119, filed on Feb. 28, 2011.

(30) Foreign Application Priority Data
Feb. 28, 2011 (EP) 11156187.4
Feb. 28, 2011 (EP) 11156244.3
Apr. 22, 2011 (EP) 11163577.7

(51) Int. Cl. C12N 15/82

(52) U.S. Cl. CPC C12N 15/8261
USPC 800/290; 800/298; 800/320; 800/320.2; 536/23.2; 435/320.1; 435/419; 435/233

(57) ABSTRACT

Provided are a method for enhancing yield-related traits in plants by modulating expression in a plant of a nucleic acid encoding a DUF642 (Protein containing a Domain of Unknown Function) polypeptide, or an epimerase-related like polypeptide, or a phospholipase/carboxylesterase (PLPCase) polypeptide, and plants having modulated expression of a nucleic acid encoding a DUF642 polypeptide, or an epimerase-related like polypeptide, or a PLPCase polypeptide, which plants have enhanced yield-related traits relative to control plants. Also provided are DUF642-encoding nucleic acids, or epimerase-related like polypeptides, or PLPCase-encoding nucleic acids, and constructs comprising the same, useful in performing the methods for enhancing yield-related traits in plants.

### BACKGROUND

[0001] The present invention relates generally to the field of molecular biology and concerns a method for enhancing yield-related traits in plants by modulating expression in a plant of a nucleic acid encoding a DUF642 (Protein containing a Domain of Unknown Function) polypeptide. The present invention also concerns plants having modulated expression of a nucleic acid encoding a DUF642 polypeptide, which plants have enhanced yield-related traits relative to corresponding wild type plants or other control plants. The invention also provides constructs useful in the methods of the invention.

[0002] The present invention furthermore concerns a method for enhancing yield-related traits in plants by modulating expression in a plant of a nucleic acid encoding an epimerase-related like polypeptide. The present invention also concerns plants having modulated expression of a nucleic acid encoding an epimerase-related like polypeptide, which plants have enhanced yield-related traits relative to corresponding wild type plants or other control plants. The invention also provides constructs useful in the methods of the invention.

[0003] The present invention also concerns a method for enhancing yield-related traits in plants by modulating expression in a plant of a nucleic acid encoding a Phospholipase/carboxylesterase (PLPCase) polypeptide. The present invention also concerns plants having modulated expression of a nucleic acid encoding a PLPCase polypeptide, which plants have enhanced yield-related traits relative to corresponding wild type plants or other control plants. The invention also provides constructs useful in the methods of the invention.

[0004] The ever-increasing world population and the dwindling supply of arable land available for agriculture fuels research towards increasing the efficiency of agriculture. Conventional means for crop and horticultural improvements utilise selective breeding techniques to identify plants having desirable characteristics. However, such selective breeding techniques have several drawbacks, namely that these techniques are typically labour intensive and result in plants that often contain heterogeneous genetic components that may not always result in the desirable trait being passed on from parent plants. Advances in molecular biology have allowed mankind to modify the germplasm of animals and plants. Genetic engineering of plants entails the isolation and manipulation of genetic material (typically in the form of DNA or RNA) and the subsequent introduction of that genetic material into a plant. Such technology has the capacity to deliver crops or plants having various improved economic, agronomic or horticultural traits.

[0005] A trait of particular economic interest is increased yield. Yield is normally defined as the measurable produce of economic value from a crop. This may be defined in terms of quantity and/or quality. Yield is directly dependent on several factors, for example, the number and size of the organs, plant architecture (for example, the number of branches), seed production, leaf senescence and more. Root development, nutrient uptake, stress tolerance and early vigour may also be important factors in determining yield. Optimizing the abovementioned factors may therefore contribute to increasing crop yield.

[0006] Seed yield is a particularly important trait, since the seeds of many plants are important for human and animal nutrition. Crops such as corn, rice, wheat, canola and soybean account for over half the total human caloric intake, whether through direct consumption of the seeds themselves or through consumption of meat products raised on processed seeds. They are also a source of sugars, oils and many kinds of metabolites used in industrial processes. Seeds contain an embryo (the source of new shoots and roots) and an endosperm (the source of nutrients for embryo growth during germination and during early growth of seedlings). The development of a seed involves many genes, and requires the transfer of metabolites from the roots, leaves and stems into the growing seed. The endosperm, in particular, assimilates the metabolic precursors of carbohydrates, oils and proteins and synthesizes them into storage macromolecules to fill out the grain.

[0007] Another important trait for many crops is early vigour. Improving early vigour is an important objective of modern rice breeding programs in both temperate and tropical rice cultivars. Long roots are important for proper soil anchorage in water-seeded rice. Where rice is sown directly into flooded fields, and where plants must emerge rapidly through water, longer shoots are associated with vigour. Where drill-seeding is practiced, longer mesocotyls and coleoptiles are important for good seedling emergence. The ability to engineer early vigour into plants would be of great importance in agriculture. For example, poor early vigour has been a limitation to the introduction of maize (Zea mays L.) hybrids based on Corn Belt germplasm in the European Atlantic.

[0008] A further important trait is that of improved abiotic stress tolerance. Abiotic stress is a primary cause of crop loss worldwide, reducing average yields for most major crop plants by more than 50% (Wang et al., Planta 218, 1-14, 2003). Abiotic stresses may be caused by drought, salinity, extremes of temperature, chemical toxicity and oxidative stress. The ability to improve plant tolerance to abiotic stress would be of great economic advantage to farmers worldwide and would allow for the cultivation of crops during adverse conditions and in territories where cultivation of crops may not otherwise be possible.

[0009] Crop yield may therefore be increased by optimising one of the above-mentioned factors.

[0010] Concerning DUF642 polypeptides, the family of DUF642 proteins represents a conserved region found in a number of uncharacterised plant proteins. DUF642 proteins were identified e.g. by Irshad et al., BMC Plant Biology 2008, 8:94.

[0011] Concerning epimerase-related like polypeptides, the present invention relates to the use of epimerase-related like polynucleotides and polypeptides in the field of plant biotechnology. Epimerases can be defined as isomerase enzymes that catalyze the inversion of stereochemistry in biological molecules.

[0012] Ascencio-Ibáñez et al. (2008, Plant Physiology 148(1):436-454) have reported amongst genes that are significantly changed during CaICuV injection an Arabodopsis epimerase gene, which is listed in a supplemental table (Table 2) of this paper. In this paper, the Arabidopsis gene is called a “Putative protein Isopenicillin-N-epimerase”. The authors described microarray analyses of the Arabidopsis (Arabidopsis thaliana) transcriptome in response to cabbage leaf curl virus (CaLCuV) infection, and indicated that they uncovered 5,365 genes (false discovery rate <0.005) differentially expressed in infected rosette leaves at 12 days postinoculation, including an Arabidopsis isomerase gene (At3g62130).

[0013] Mehta and Christen (1994 Biochem. Biophys. Res. Commun. 14; 198(1):138-43) described the homology of isopenicillin-N-epimerases to aminotransferases.

[0014] Concerning PLPCase polypeptides, the PLPCase polypeptide family contains both phospholipases and carboxylesterases with broad substrate specificity, and is structurally related to alpha/beta hydrolases. Members of the PLPCase superfamily are present in plants, but also in other organisms such as yeast and bacteria. In Arabidopsis, SOBER1 gene encoding a PLPCase is involved in resistance to plant pathogen P. synringae pv tomato DC3000 (Kirik and Mudgett (2009), PNAS 106 (48): 20532-20537). Recent studies showed that PLPCase might have arisen from rare horizontal gene transfer from fungi to plant (Richards et al. (2009), The Plant Cell, 21(7): 1897-1911).

[0015] Depending on the end use, the modification of certain yield traits may be favoured over others. For example for applications such as forage or wood production, or bio-fuel resource, an increase in the vegetative parts of a plant may be desirable, and for applications such as flour, starch or oil production, an increase in seed parameters may be particularly desirable. Even amongst the seed parameters, some may be favoured over others, depending on the application. Various mechanisms may contribute to increasing seed yield, whether that is in the form of increased seed size or increased seed number.

[0016] It has now been found that various yield-related traits may be improved in plants by modulating expression in a plant of a nucleic acid encoding a DUF642 polypeptide, or an epimerase-related like polypeptide, or a PLPCase polypeptide in a plant.

### DETAILED DESCRIPTION OF THE INVENTION

[0017] The present invention shows that modulating expression in a plant of a nucleic acid encoding a DUF642 polypeptide, or an epimerase-related like polypeptide, or a PLPCase polypeptide gives plants having enhanced yield-related traits relative to control plants. According to a first embodiment, the present invention provides a method for enhancing yield-related traits in plants relative to control plants, comprising modulating expression in a plant of a nucleic acid encoding a DUF642 polypeptide, or an epimerase-related like polypeptide, or a PLPCase polypeptide and optionally selecting for plants having enhanced yield-related traits. According to another embodiment, the present invention provides a method for producing plants having enhanced yield-related traits relative to control plants, wherein said method comprises the steps of modulating expression in said plant of a nucleic acid encoding a DUF642 polypeptide, or an epimerase-related like polypeptide, or a PLPCase polypeptide as described herein and optionally selecting for plants having enhanced yield-related traits.

[0018] A preferred method for modulating (preferably, increasing) expression of a nucleic acid encoding a DUF642 polypeptide, or an epimerase-related like polypeptide, or a PLPCase polypeptide is by introducing and expressing in a plant a nucleic acid encoding a DUF642 polypeptide, or an epimerase-related like polypeptide, or a PLPCase polypeptide.

[0019] Any reference hereinafter to a “protein useful in the methods of the invention” is taken to mean a DUF642 polypeptide, or an epimerase-related like polypeptide, or a PLPCase polypeptide as defined herein. Any reference hereinafter to a “nucleic acid useful in the methods of the invention” is taken to mean a nucleic acid capable of encoding such a DUF642 polypeptide, or an epimerase-related like polypeptide, or a PLPCase polypeptide. The nucleic acid to be introduced into a plant (and therefore useful in performing the methods of the invention) is any nucleic acid encoding the type of protein which will now be described, hereafter also named “DUF642 nucleic acid”, or “epimerase-related like nucleic acid”, or “PLPCase nucleic acid” or “DUF642 gene”, or “epimerase-related like gene”, or “PLPCase gene”.

[0020] A “DUF642 polypeptide” as defined herein refers to any polypeptide comprising an InterPro accession IPR006946DUF642 domain, preferably said DUF642 polypeptide comprises the signature sequence FSAARTCAQ (SEQ ID NO: 194).

[0021] The term “DUF642” or “DUF642 polypeptide” as used herein also intends to include homologues as defined hereunder of “DUF642 polypeptide”.

[0022] Preferably, the DUF642 polypeptide polypeptide comprises one or more of the following motifs:

| | | |
|---|---|---|
| | | (SEQ ID NO: 181) |
| (i) | Motif 1: | N[LAM][VL]KNG[DG]FEEGP[WYH][MI][FLI]P[NG][TS][STR] |
| | | [WL]GVL[LVI]P[PTS][NKM][LQDV][EDV][DE][ED][THY]S |
| | | [PS]L[PS][GP]W[IMT][IV], |
| | | (SEQ ID NO: 182) |
| (ii) | Motif 2: | [VLA][EKAT][KPR]G[SAM][LRH]Y[SA][LIV][TI]F[SG]A |
| | | [AS]RTCAQ[DLAS]E[SVRL]L[NR][VI], |
| | | (SEQ ID NO: 183) |
| (iii) | Motif 3: | D[PE][AT]CGP[LI][IL]D[AS][VIF]AI[KR] |

[0023] More preferably, the DUF642 polypeptide comprises one or more of the following motifs:

| (SEQ ID NO: 184) | | |
|---|---|---|
| (i) | Motif 4: | N[ML][LV][KR]NG[DG]FEEGPY[IF][FLI]P[GND][TA][SPR]WGVL[VI]P[PS] |
| | | [MN][DIV][EV], |
| (SEQ ID NO: 185) | | |
| (ii) | Motif 5: | N[VI][ST][VAI][SAT][PG][EQ][SW][GA][VE][LI]P[IM]QT[VIM]Y[TGS]S[SN] |
| | | GWDSY[SA]WA[FW], |
| (SEQ ID NO: 186) | | |
| (iii) | Motif 6: | Y[SA][IL][TI]FSAARTCAQ[AS]E |

[0024] Even more preferably, the DUF642 polypeptide comprises in increasing order of preference, at least 2, at least 3, at least 4, at least 5, or all 6 motifs.

[0025] Motifs 1 to 6 were derived using the MEME algorithm (Bailey and Elkan, Proceedings of the Second International Conference on Intelligent Systems for Molecular Biology, pp. 28-36, AAAI Press, Menlo Park, Calif., 1994). At each position within a MEME motif, the residues are shown that are present in the query set of sequences with a frequency higher than 0.2. Residues within square brackets represent alternatives.

[0026] Additionally or alternatively, the homologue of a DUF642 protein has in increasing order of preference at least 29%, 30%, 31%, 32%, 33%, 34%, 35%, 36%, 37%, 38%, 39%, 40%, 41%, 42%, 43%, 44%, 45%, 46%, 47%, 48%, 49%, 50%, 51%, 52%, 53%, 54%, 55%, 56%, 57%, 58%, 59%, 60%, 61%, 62%, 63%, 64%, 65%, 66%, 67%, 68%, 69%, 70%, 71%, 72%, 73%, 74%, 75%, 76%, 77%, 78%, 79%, 80%, 81%, 82%, 83%, 84%, 85%, 86%, 87%, 88%, 89%, 90%, 91%, 92%, 93%, 94%, 95%, 96%, 97%, 98%, or 99% overall sequence identity to the amino acid represented by SEQ ID NO: 2 or 4, provided that the homologous protein comprises any one or more of the conserved motifs as outlined above. The overall sequence identity is determined using a global alignment algorithm, such as the Needleman Wunsch algorithm in the program GAP (GCG Wisconsin Package, Accelrys), preferably with default parameters and preferably with sequences of mature proteins (i.e. without taking into account secretion signals or transit peptides).

[0027] In one embodiment the sequence identity level is determined by comparison of the polypeptide sequences over the entire length of the sequence of SEQ ID NO: 2 or SEQ ID NO: 4.

[0028] Compared to overall sequence identity, the sequence identity will generally be higher when only conserved domains or motifs are considered. Preferably the motifs in a DUF642 polypeptide have, in increasing order of preference, at least 70%, 71%, 72%, 73%, 74%, 75%, 76%, 77%, 78%, 79%, 80%, 81%, 82%, 83%, 84%, 85%, 86%, 87%, 88%, 89%, 90%, 91%, 92%, 93%, 94%, 95%, 96%, 97%, 98%, or 99% sequence identity to any one or more of the motifs represented by SEQ ID NO: 181 to SEQ ID NO: 186 (Motifs 1 to 6).

[0029] In other words, in another embodiment a method is provided wherein said DUF642 polypeptide comprises a conserved domain (or motif) with at least 70%, 71%, 72%, 73%, 74%, 75%, 76%, 77%, 78%, 79%, 80%, 81%, 82%, 83%, 84%, 85%, 86%, 87%, 88%, 89%, 90%, 91%, 92%, 93%, 94%, 95%, 96%, 97%, 98%, or 99% sequence identity to the conserved motifs starting with amino acid 202 up to amino acid 241 (motif 1), amino acid 108 up to amino acid 132 (motif 2), amino acid 178 up to amino acid 191 (motif 3) in SEQ ID NO:2; the conserved motifs starting with amino acid 202 up to amino acid 230 (motif 4), amino acid 130 up to amino acid 159 (motif 5), amino acid 114 up to amino acid 128 (motif 6) in SEQ ID NO:2; the conserved motifs starting with amino acid 121 up to amino acid 160 (motif 1), amino acid 27 up to amino acid 51 (motif 2), amino acid 97 up to amino acid 110 (motif 3) in SEQ ID NO:4; the conserved motifs starting with amino acid 121 up to amino acid 149 (motif 4), amino acid 50 up to amino acid 78 (motif 5), amino acid 33 up to amino acid 47 (motif 6) in SEQ ID NO:4.

[0030] An “epimerase-related like polypeptide” or “epimerase-related like protein” as defined herein refers to any polypeptide having an amino acid sequence which comprises one or more of the following motifs:

| (SEQ ID NO: 273) | | |
|---|---|---|
| (i) | Motif 7: | CREEGV[DE][QK]VFVD[AG]AH[AS]IG[QSC]V[PDE][VI][DN][VM][KR][ED]IGA |
| | | DFY[TV]SNLHKWFFCPP[SA]VAFL[YH], |
| (SEQ ID NO: 274) | | |
| (ii) | Motif 8: | EF[SA]HH[DN]P[GAN]VAR[IV]NNGSFG[CS]CP[AG]S[VI][LI]AAQ[ARK][RN]WQ |
| | | [LR][LRQ]FL[RQA]QPD[AD]FYF[ND]xL[QRK][PK]G, |
| (SEQ ID NO: 275) | | |
| (iii) | Motif 9: | S[LI]VDNATTAAAIVLQ[HQ][VAI][AG][WR][AS]FAEG[RKN]FA[KR][GN]D[AVT]V |
| | | [LV]MLH[YC]AY[GQ][AS]VKKSI[EQH]AYV |

[0031] Motifs 7 to 9 were derived using the MEME algorithm (Bailey and Elkan, Proceedings of the Second International Conference on Intelligent Systems for Molecular Biology, pp. 28-36, AAAI Press, Menlo Park, Calif., 1994). At each position within a MEME motif, the residues are shown that are present in the query set of sequences with a frequency higher than 0.2. Residues within square brackets represent alternatives.

[0032] More preferably, the epimerase-related like polypeptide comprises in increasing order of preference, at least 1, at least 2, or all 3 motifs.

[0033] In another embodiment, an epimerase-related like polypeptide as used herein comprises a polypeptide having one or more of the domains as listed in Table C, and in particular having one or more of the following domains:
[0034] a domain as determined with the superfamily database and having accession number SSF53383;
[0035] a domain as determined with the HMMPanther database and having accession number as PTHR11601
[0036] a domain as determined with the HMMPfam database and having accession number PF00266; and
[0037] a domain as determined with the Gene3D database and having accession number G3DSA:3.40.640.10

[0038] In another preferred embodiment, an epimerase-related like polypeptide as used herein comprises a conserved domain (or motif) with at least 50%, 51%, 52%, 53%, 54%, 55%, 56%, 57%, 58%, 59%, 60%, 61%, 62%, 63%, 64%, 65%, 66%, 67%, 68%, 69%, 70%, 71%, 72%, 73%, 74%, 75%, 76%, 77%, 78%, 79%, 80%, 81%, 82%, 83%, 84%, 85%, 86%, 87%, 88%, 89%, 90%, 91%, 92%, 93%, 94%, 95%, 96%, 97%, 98%, 99% sequence identity to or consists of a conserved domain as represented by any one of:
[0039] amino acid coordinates 32 to 449 in SEQ ID NO: 198 (motif 10-SEQ ID NO: 280);
[0040] amino acid coordinates 47 to 276 in SEQ ID NO: 198 (motif 11-SEQ ID NO: 281);
[0041] amino acid coordinates 92 to 364 in SEQ ID NO: 198 (motif 12-SEQ ID NO: 282); and
[0042] amino acid coordinates 59 to 323 in SEQ ID NO: 198 (motif 13-SEQ ID NO: 283).

[0043] The term “epimerase-related like polypeptide” as used herein also intends to include homologues as defined hereunder of an “epimerase-related like polypeptide”.

[0044] Additionally or alternatively, the homologue of an epimerase-related like protein has in increasing order of preference at least 40%, 41%, 42%, 43%, 44%, 45%, 46%, 47%, 48%, 49%, 50%, 51%, 52%, 53%, 54%, 55%, 56%, 57%, 58%, 59%, 60%, 61%, 62%, 63%, 64%, 65%, 66%, 67%, 68%, 69%, 70%, 71%, 72%, 73%, 74%, 75%, 76%, 77%, 78%, 79%, 80%, 81%, 82%, 83%, 84%, 85%, 86%, 87%, 88%, 89%, 90%, 91%, 92%, 93%, 94%, 95%, 96%, 97%, 98%, or 99% overall sequence identity to the amino acid represented by SEQ ID NO: 198, provided that the homologous protein comprises any one or more of the conserved motifs or domains as outlined above. The overall sequence identity is determined using a global alignment algorithm, such as the Needleman Wunsch algorithm in the program GAP (GCG Wisconsin Package, Accelrys), preferably with default parameters and preferably with sequences of mature proteins (i.e. without taking into account secretion signals or transit peptides).

[0045] In one embodiment the sequence identity level is determined by comparison of the polypeptide sequences over the entire length of the sequence of SEQ ID NO: 198.

[0046] Compared to overall sequence identity, the sequence identity will generally be higher when only conserved domains or motifs are considered. Preferably the motifs in an epimerase-related like polypeptide have, in increasing order of preference, at least 70%, 71%, 72%, 73%, 74%, 75%, 76%, 77%, 78%, 79%, 80%, 81%, 82%, 83%, 84%, 85%, 86%, 87%, 88%, 89%, 90%, 91%, 92%, 93%, 94$, 95%, 96%, 97%, 98%, or 99% sequence identity to any one or more of the motifs 1 to 7 (as represented by SEQ ID NO 273, 274, 275, 280, 281, 282, 283, respectively) as described above.

[0047] A “PLPCase polypeptide” as defined herein refers to any polypeptide comprising an InterPro accession IPR003140 corresponding to PFAM accession number PF022030 Phospholipase/carboxylesterase (PLPCase) domain.

[0048] The term “PLPCase” or “PLPCase polypeptide” as used herein also intends to include homologues as defined hereunder of “PLPCase polypeptide”.

[0049] In a preferred embodiment, the PLPCase polypeptide comprises one or more of the following motifs:

| (SEQ ID NO: 348) | | |
|---|---|---|
| (i) | Motif 14: | E[FY]G[KR]T[HY]VVRPKG[KR]HQATIVWLHGLGDNG[LSA]S[SW]SQLL |
| | | [ED][ST]LPLPNIKWICPTA, |
| (SEQ ID NO: 349) | | |
| (ii) | Motif 15: | PDD[WIVL]EGLDASAAH[IV]ANLLS[TS]EP[AS]D[VI]K[VL]G[IV]G, |
| (SEQ ID NO: 350) | | |
| (iii) | Motif 16: | FSMGAA[IT]ALYSA[TA]C[YF]A[MHL] |

[0050] In a more preferred embodiment, the PLPCase polypeptide comprises one or more of the following motifs:

| (SEQ ID NO: 351) | | |
|---|---|---|
| (i) | Motif 17: | E[FY]G[KR]T[HY]VVRPKGKH[QK]ATIVWLHGLGDNG[LS]S[SW]SQL |
| | | LE[ST]LPLPNIKWICPTA |
| (SEQ ID NO: 352) | | |
| (ii) | Motif 18: | ED[GA]PDD[WLV]EGLDA[SA]AAH[IV]ANLLSTEPA[DN][VI]K |
| (SEQ ID NO: 353) | | |
| (iii) | Motif 19: | [LF]GGFP[CS]TAWFD |

[0051] In an alternative preferred embodiment, the PLPCase polypeptide comprises one or more of the following motifs:

| (SEQ ID NO: 354) | | |
|---|---|---|
| (i) | Motif 20: | T[HY]VVRPKG[KR]HQATIVWLHG[LI]GDNG[LAG]S[SW]SQLL[ED]SLP |
| | | LPN[IV]KWICPTAP[TS]RP |
| (SEQ ID NO: 355) | | |
| (ii) | Motif 21: | FPCTAWFDV[GE][ED][LT]S[ELV]DG[PHR]DD[WI]EG[LM]DASA[AS]H |
| | | [IV]ANLLS[TS]EP[AS]DV[KS][VL]GIGGFSM |
| (SEQ ID NO: 356) | | |
| (iii) | Motif 22: | FK[SP]Y[END]G[IL]GHYT[VI]P[RE]EM[GD][ED]V[SC][TKN] |

[0052] In a most preferred embodiment, the PLPCase polypeptide comprises one or more of the following motifs:

| (SEQ ID NO: 357) | | |
|---|---|---|
| (i) | Motif 23: | EFG[KR]T[HY]VVRPKGKHQATIVWLHGLGDNG[LS]SS[SY]QLLES |
| | | LPLPNIKWICPTA |
| (SEQ ID NO: 358) | | |
| (ii) | Motif 24: | SEDG[PH]DDWEGLDASA[AS]HIANLLSTEPADV |
| (SEQ ID NO: 259) | | |
| (iii) | Motif 25: | G[IT]SDDVV[LP]Y[KR][YF]GEKSAQSLS[SM]AGFRY[VI][AMT]FK[SP]Y |

[0053] Motifs 14 to 25 were derived using the MEME algorithm (Bailey and Elkan, Proceedings of the Second International Conference on Intelligent Systems for Molecular Biology, pp. 28-36, AAAI Press, Menlo Park, Calif., 1994). At each position within a MEME motif, the residues are shown that are present in the query set of sequences with a frequency higher than 0.2. Residues within square brackets represent alternatives.

[0054] More preferably, the PLPCase polypeptide comprises in increasing order of preference, at least 2, at least 3, at least 4, at least 5, at least 6, at least 7, at least 8, at least 9, at least 10, at least 11, or all 12 motifs.

[0055] Additionally or alternatively, the homologue of a PLPCase protein has in increasing order of preference at least 25%, 26%, 27%, 28%, 29%, 30%, 31%, 32%, 33%, 34%, 35%, 36%, 37%, 38%, 39%, 40%, 41%, 42%, 43%, 44%, 45%, 46%, 47%, 48%, 49%, 50%, 51%, 52%, 53%, 54%, 55%, 56%, 57%, 58%, 59%, 60%, 61%, 62%, 63%, 64%, 65%, 66%, 67%, 68%, 69%, 70%, 71%, 72%, 73%, 74%, 75%, 76%, 77%, 78%, 79%, 80%, 81%, 82%, 83%, 84%, 85%, 86%, 87%, 88%, 89%, 90%, 91%, 92%, 93%, 94%, 95%, 96%, 97%, 98%, or 99% overall sequence identity to the amino acid represented by SEQ ID NO: 285, provided that the homologous protein comprises any one or more of the conserved motifs as outlined above. The overall sequence identity is determined using a global alignment algorithm, such as the Needleman Wunsch algorithm in the program GAP (GCG Wisconsin Package, Accelrys), preferably with default parameters and preferably with sequences of mature proteins (i.e. without taking into account secretion signals or transit peptides). Compared to overall sequence identity, the sequence identity will generally be higher when only conserved domains or motifs are considered. Preferably the motifs in a PLPCase polypeptide have, in increasing order of preference, at least 70%, 71%, 72%, 73%, 74%, 75%, 76%, 77%, 78%, 79%, 80%, 81%, 82%, 83%, 84%, 85%, 86%, 87%, 88%, 89%, 90%, 91%, 92%, 93%, 94%, 95%, 96%, 97%, 98%, or 99% sequence identity to any one or more of the motifs represented by SEQ ID NO: 348 to SEQ ID NO: 359 (Motifs 14 to 25).

[0056] In another preferred embodiment a method is provided wherein said PLPCase polypeptide comprises a conserved domain (or motif) with at least 70%, 71%, 72%, 73%, 74%, 75%, 76%, 77%, 78%, 79%, 80%, 81%, 82%, 83%, 84%, 85%, 86%, 87%, 88%, 89%, 90%, 91%, 92%, 93%, 94%, 95%, 96%, 97%, 98%, or 99% sequence identity to the conserved domain starting with amino acid 20 up to amino acid 69 and/or amino acid 92 to amino acid 118 and/or amino acid 194 to amino acid 225 in SEQ ID NO:285).

[0057] The terms “domain”, “signature” and “motif” are defined in the “definitions” section herein.

[0058] Preferably, the polypeptide sequence which when used in the construction of a phylogenetic tree, such as the one depicted in FIG. 5, clusters with the group of DUF642 polypeptides comprising the amino acid sequence represented by SEQ ID NO: 2 and/or 4 rather than with any other group.

[0059] In addition, DUF642 polypeptides, when expressed in rice according to the methods of the present invention as outlined in Examples 6 and 7, give plants having increased yield related traits, in particular when grown under non-stress conditions, total seed yield (Totalwgseeds), number of seeds (nrfilledseed), seed fill rate (fillrate), harvest index, greenness before flowering, total number of seeds (nrtotalseed) and for aboveground biomass (AreaMax).

[0060] Preferably, the polypeptide sequence which when used in the construction of a phylogenetic tree, such as the one depicted in FIG. 9, clusters with the group of epimerase-related like polypeptides comprising the amino acid sequence represented by SEQ ID NO: 198 rather than with any other group.

[0061] In addition, epimerase-related like polypeptides, when expressed in rice according to the methods of the present invention as outlined in Examples 6 and 7, give plants having increased yield related traits, in particular increased biomass and/or increase seed yield, and more particularly any one or more of increased total weight of seeds, harvest index, fill rate, thousand kernel weight (TKW), above ground biomass, and number of filled seeds.

[0062] Preferably, the polypeptide sequence which when used in the construction of a phylogenetic tree, such as the one depicted in FIG. 14, clusters with the group of PLPCase polypeptides comprising the amino acid sequence represented by SEQ ID NO: 285 rather than with any other group.

[0063] Furthermore, PLPCase polypeptides (at least in their native form) typically have phospholipase and/or carboxylesterase activity. Tools and techniques for measuring phospholipase and/or carboxylesterase activity are well known in the art, as e.g. Kirik and Mudgett (2009), PNAS 106 (48): 20532-20537.

[0064] In addition, PLPCase polypeptides, when expressed in rice according to the methods of the present invention as outlined in Examples 6 and 7, give plants having increased yield related traits, in particular increased root biomass and greenness index.

[0065] In one embodiment of the present invention the function of the nucleic acid sequences of the invention is to confer information for a protein that increases yield or yield related traits, when a nucleic acid sequence of the invention is transcribed and translated in a living plant cell.

[0066] In one embodiment of the present invention the function of the nucleic acid sequences of the invention is to confer information for synthesis of the PLPCase polypeptides that increases yield or yield related traits, when such a nucleic acid sequence of the invention is transcribed and translated in a living plant cell.

[0067] The present invention is illustrated by transforming plants with the nucleic acid sequence represented by SEQ ID NO: 1, encoding the polypeptide sequence of SEQ ID NO: 2. However, performance of the invention is not restricted to these sequences; the methods of the invention may advantageously be performed using any DUF642-encoding nucleic acid or DUF642 polypeptide as defined herein.

[0068] Examples of nucleic acids encoding DUF642 polypeptides are given in Table A1 of the Examples section herein. Such nucleic acids are useful in performing the methods of the invention. The amino acid sequences given in Table A1 of the Examples section are example sequences of orthologues and paralogues of the DUF642 polypeptide represented by SEQ ID NO: 2, the terms “orthologues” and “paralogues” being as defined herein. Further orthologues and paralogues may readily be identified by performing a so-called reciprocal blast search as described in the definitions section; where the query sequence is SEQ ID NO: 1 or SEQ ID NO: 2; or SEQ ID NO: 3 or SEQ ID NO: 4, the second BLAST (back-BLAST) would be against rice sequences.

[0069] The invention also provides hitherto unknown DUF642-encoding nucleic acids and DUF642 polypeptides useful for conferring enhanced yield-related traits in plants relative to control plants.

[0070] According to a further embodiment of the present invention, there is therefore provided an isolated nucleic acid molecule selected from:
[0071] (i) a nucleic acid represented by SEQ ID NO: 33, 39, 91, 169, 171, 175;
[0072] (ii) the complement of a nucleic acid represented by SEQ ID NO: 33, 39, 91, 169, 171, 175;
[0073] (iii) a nucleic acid encoding a DUF642 polypeptide having in increasing order of preference at least 50%, 51%, 52%, 53%, 54%, 55%, 56%, 57%, 58%, 59%, 60%, 61%, 62%, 63%, 64%, 65%, 66%, 67%, 68%, 69%, 70%, 71%, 72%, 73%, 74%, 75%, 76%, 77%, 78%, 79%, 80%, 81%, 82%, 83%, 84%, 85%, 86%, 87%, 88%, 89%, 90%, 91%, 92%, 93%, 94%, 95%, 96%, 97%, 98%, or 99% sequence identity to the amino acid sequence represented by SEQ ID NO: 34, 40, 92, 170, 172, 176, and additionally or alternatively comprising one or more motifs having in increasing order of preference at least 50%, 55%, 60%, 65%, 70%, 75%, 80%, 85%, 90%, 95%, 96%, 97%, 98%, 99% or more sequence identity to any one or more of the motifs given in SEQ ID NO: 181 to SEQ ID NO: 186, and further preferably conferring enhanced yield-related traits relative to control plants.
[0074] (iv) a nucleic acid molecule which hybridizes with a nucleic acid molecule of (i) to (iii) under high stringency hybridization conditions and preferably confers enhanced yield-related traits relative to control plants.

[0075] According to a further embodiment of the present invention, there is also provided an isolated polypeptide selected from:
[0076] (i) an amino acid sequence represented by SEQ ID NO: 34, 40, 92, 170, 172, 176;
[0077] (ii) an amino acid sequence having, in increasing order of preference, at least 50%, 51%, 52%, 53%, 54%, 55%, 56%, 57%, 58%, 59%, 60%, 61%, 62%, 63%, 64%, 79%, 80%, 81%, 82%, 83%, 84%, 85%, 86%, 87%, 88%, 89%, 90%, 91%, 92%, 93%, 94%, 95%, 96%, 97%, 98%, or 99% sequence identity to the amino acid sequence represented by SEQ ID NO: 34, 40, 92, 170, 172, 176, and additionally or alternatively comprising one or more motifs having in increasing order of preference at least 50%, 55%, 60%, 65%, 70%, 75%, 80%, 85%, 90%, 95%, 96%, 97%, 98%, 99% or more sequence identity to any one or more of the motifs given in SEQ ID NO: 181 to SEQ ID NO: 186, and further preferably conferring enhanced yield-related traits relative to control plants;
[0078] (iii) derivatives of any of the amino acid sequences given in (i) or (ii) above.

[0079] The present invention is illustrated by transforming plants with the nucleic acid sequence represented by SEQ ID NO: 197, encoding the polypeptide sequence of SEQ ID NO: 198. However, performance of the invention is not restricted to these sequences; the methods of the invention may advantageously be performed using any nucleic acid encoding epimerase-related like polypeptides or any epimerase-related like polypeptide as defined herein.

[0080] Examples of nucleic acids encoding epimerase-related like polypeptides are given in Table A2 of the Examples section herein. Such nucleic acids are useful in performing the methods of the invention. The amino acid sequences given in Table A2 of the Examples section are example sequences of orthologues and paralogues of the epimerase-related like polypeptide represented by SEQ ID NO: 198, the terms “orthologues” and “paralogues” being as defined herein. Further orthologues and paralogues may readily be identified by performing a so-called reciprocal blast search as described in the definitions section; where the query sequence is SEQ ID NO: 197 or SEQ ID NO: 198, the second BLAST (back-BLAST) would be against poplar sequences.

[0081] The invention also provides hitherto unknown epimerase-related like-encoding nucleic acids and epimerase-related like polypeptides useful for conferring enhanced yield-related traits in plants relative to control plants.

[0082] According to a further embodiment of the present invention, there is therefore provided an isolated nucleic acid molecule selected from:
[0083] (i) a nucleic acid represented by SEQ ID NO: 199;
[0084] (ii) the complement of a nucleic acid represented by SEQ ID NO: 199;
[0085] (iii) a nucleic acid encoding epimerase-related like polypeptide having in increasing order of preference at least 50%, 51%, 52%, 53%, 54%, 55%, 56%, 57%, 58%, 59%, 60%, 61%, 62%, 63%, 64%, 65%, 66%, 67%, 68%, 69%, 70%, 71%, 72%, 73%, 74%, 75%, 76%, 77%, 78%, 79%, 80%, 81%, 82%, 83%, 84%, 85%, 86%, 87%, 88%, 89%, 90%, 91%, 92%, 93%, 94%, 95%, 96%, 97%, 98%, or 99% sequence identity to the amino acid sequence represented by SEQ ID NO: 200, and additionally or alternatively comprising one or more motifs having in increasing order of preference at least 50%, 55%, 60%, 65%, 70%, 75%, 80%, 85%, 90%, 95%, 96%, 97%, 98%, 99% or more sequence identity to any one or more of the motifs 7 to 13 as given herein, and further preferably conferring enhanced yield-related traits relative to control plants,
[0086] (iv) a nucleic acid molecule which hybridizes with a nucleic acid molecule of (i) to (iii) under high stringency hybridization conditions and preferably confers enhanced yield-related traits relative to control plants.

[0087] According to a further embodiment of the present invention, there is also provided an isolated polypeptide selected from:
[0088] (i) an amino acid sequence represented by SEQ ID NO: 200;
[0089] (ii) an amino acid sequence having, in increasing order of preference, at least 50%, 51%, 52%, 53%, 54%, 55%, 56%, 57%, 58%, 59%, 60%, 61%, 62%, 63%, 64%, 65%, 66%, 67%, 68%, 69%, 70%, 71%, 72%, 73%, 74%, 75%, 76%, 77%, 78%, 79%, 80%, 81%, 82%, 83%, 84%, 85%, 86%, 87%, 88%, 89%, 90%, 91%, 92%, 93%, 94%, 95%, 96%, 97%, 98%, or 99% sequence identity to the amino acid sequence represented by SEQ ID NO: 200, and additionally or alternatively comprising one or more motifs having in increasing order of preference at least 50%, 55%, 60%, 65%, 70%, 75%, 80%, 85%, 90%, 95%, 96%, 97%, 98%, 99% or more sequence identity to any one or more of the motifs 7 to 13 as given herein, and further preferably conferring enhanced yield-related traits relative to control plants;
[0090] (iii) derivatives of any of the amino acid sequences given in (i) or (ii) above.

[0091] The present invention is illustrated by transforming plants with the nucleic acid sequence represented by SEQ ID NO: 284, encoding the polypeptide sequence of SEQ ID NO: 285. However, performance of the invention is not restricted to these sequences; the methods of the invention may advantageously be performed using any PLPCase-encoding nucleic acid or PLPCase polypeptide as defined herein.

[0092] Examples of nucleic acids encoding PLPCase polypeptides are given in Table A3 of the Examples section herein. Such nucleic acids are useful in performing the methods of the invention. The amino acid sequences given in Table A3 of the Examples section are example sequences of orthologues and paralogues of the PLPCase polypeptide represented by SEQ ID NO: 285, the terms “orthologues” and “paralogues” being as defined herein. Further orthologues and paralogues may readily be identified by performing a so-called reciprocal blast search as described in the definitions section; where the query sequence is SEQ ID NO: 284 or SEQ ID NO: 285, the second BLAST (back-BLAST) would be against Medicago truncatula sequences.

[0093] The invention also provides hitherto unknown PLPCase-encoding nucleic acids and PLPCase polypeptides useful for conferring enhanced yield-related traits in plants relative to control plants.

[0094] According to a further embodiment of the present invention, there is therefore provided an isolated nucleic acid molecule selected from:
[0095] (i) a nucleic acid represented by any one of SEQ ID NO: 298, 302, 304, 312, 316, 336 or 346;
[0096] (ii) the complement of a nucleic acid represented by any one of SEQ ID NO: 298, 302, 304, 312, 316, 336 or 346;
[0097] (iii) a nucleic acid encoding a PLPCase polypeptide having in increasing order of preference at least 50%, 51%, 52%, 53%, 54%, 55%, 56%, 57%, 58%, 59%, 60%, 61%, 62%, 63%, 64%, 65%, 66%, 67%, 68%, 69%, 70%, 71%, 72%, 73%, 74%, 75%, 76%, 77%, 78%, 79%, 80%, 81%, 82%, 83%, 84%, 85%, 86%, 87%, 88%, 89%, 90%, 91%, 92%, 93%, 94%, 95%, 96%, 97%, 98%, or 99% sequence identity to the amino acid sequence represented by any one of SEQ ID NO: 299, 303, 305, 313, 317, 337 or 347, and additionally or alternatively comprising one or more motifs having in increasing order of preference at least 50%, 55%, 60%, 65%, 70%, 75%, 80%, 85%, 90%, 95%, 96%, 97%, 98%, 99% or more sequence identity to any one or more of the motifs given in SEQ ID NO: 348 to SEQ ID NO: 359, and further preferably conferring enhanced yield-related traits relative to control plants.
[0098] (iv) a nucleic acid molecule which hybridizes with a nucleic acid molecule of (i) to (iii) under high stringency hybridization conditions and preferably confers enhanced yield-related traits relative to control plants.

[0099] According to a further embodiment of the present invention, there is also provided an isolated polypeptide selected from:
[0100] (i) an amino acid sequence represented by any one of SEQ ID NO: 299, 303, 305, 313, 317, 337 or 347;
[0101] (ii) an amino acid sequence having, in increasing order of preference, at least 50%, 51%, 52%, 53%, 54%, 55%, 56%, 57%, 58%, 59%, 60%, 61%, 62%, 63%, 64%, 65%, 66%, 67%, 68%, 69%, 70%, 71%, 72%, 73%, 74%, 75%, 76%, 77%, 78%, 79%, 80%, 81%, 82%, 83%, 84%, 85%, 86%, 87%, 88%, 89%, 90%, 91%, 92%, 93%, 94%, 95%, 96%, 97%, 98%, or 99% sequence identity to the amino acid sequence represented by any one of SEQ ID NO: 299, 303, 305, 313, 317, 337 or 347, and additionally or alternatively comprising one or more motifs having in increasing order of preference at least 50%, 55%, 60%, 65%, 70%, 75%, 80%, 85%, 90%, 95%, 96%, 97%, 98%, 99% or more sequence identity to any one or more of the motifs given in SEQ ID NO: 348 to SEQ ID NO: 359, and further preferably conferring enhanced yield-related traits relative to control plants;
[0102] (iii) derivatives of any of the amino acid sequences given in (i) or (ii) above.

[0103] Nucleic acid variants may also be useful in practising the methods of the invention. Examples of such variants include nucleic acids encoding homologues and derivatives of any one of the amino acid sequences given in Table A1 to A3 of the Examples section, the terms “homologue” and “derivative” being as defined herein. Also useful in the methods of the invention are nucleic acids encoding homologues and derivatives of orthologues or paralogues of any one of the amino acid sequences given in Table A1 to A3 of the Examples section. Homologues and derivatives useful in the methods of the present invention have substantially the same biological and functional activity as the unmodified protein from which they are derived. Further variants useful in practising the methods of the invention are variants in which codon usage is optimised or in which miRNA target sites are removed.

[0104] Further nucleic acid variants useful in practising the methods of the invention include portions of nucleic acids encoding DUF642 polypeptides, or epimerase-related like polypeptides, or PLPCase polypeptides, nucleic acids hybridising to nucleic acids encoding POI polypeptides, splice variants of nucleic acids encoding DUF642 polypeptides, or epimerase-related like polypeptides, or PLPCase polypeptides, allelic variants of nucleic acids encoding DUF642 polypeptides, or epimerase-related like polypeptides, or PLPCase polypeptides and variants of nucleic acids encoding DUF642 polypeptides, or epimerase-related like polypeptides, or PLPCase polypeptides obtained by gene shuffling. The terms hybridising sequence, splice variant, allelic variant and gene shuffling are as described herein.

[0105] Nucleic acids encoding DUF642 polypeptides, or epimerase-related like polypeptides, or PLPCase polypeptides need not be full-length nucleic acids, since performance of the methods of the invention does not rely on the use of full-length nucleic acid sequences. According to the present invention, there is provided a method for enhancing yield-related traits in plants, comprising introducing and expressing in a plant a portion of any one of the nucleic acid sequences given in Table A1 to A3 of the Examples section, or a portion of a nucleic acid encoding an orthologue, paralogue or homologue of any of the amino acid sequences given in Table A1 to A3 of the Examples section.

[0106] A portion of a nucleic acid may be prepared, for example, by making one or more deletions to the nucleic acid. The portions may be used in isolated form or they may be fused to other coding (or non-coding) sequences in order to, for example, produce a protein that combines several activities. When fused to other coding sequences, the resultant polypeptide produced upon translation may be bigger than that predicted for the protein portion.

[0107] Concerning DUF642 polypeptides, portions useful in the methods of the invention, encode a DUF642 polypeptide as defined herein, and have substantially the same biological activity as the amino acid sequences given in Table A1 of the Examples section. Preferably, the portion is a portion of any one of the nucleic acids given in Table A1 of the Examples section, or is a portion of a nucleic acid encoding an orthologue or paralogue of any one of the amino acid sequences given in Table A1 of the Examples section. Preferably the portion is at least 250, 300, 350, 400, 450 consecutive nucleotides in length, the consecutive nucleotides being of any one of the nucleic acid sequences given in Table A1 of the Examples section, or of a nucleic acid encoding an orthologue or paralogue of any one of the amino acid sequences given in Table A1 of the Examples section. Most preferably the portion is a portion of the nucleic acid of SEQ ID NO: 1. Preferably, the portion encodes a fragment of an amino acid sequence which, when used in the construction of a phylogenetic tree, such as the one depicted in FIG. 5, clusters with the group of DUF642 polypeptides comprising the amino acid sequence represented by SEQ ID NO: 2 or 4 rather than with any other group, and/or comprises at least one of the motifs 1 to 6 (SEQ ID NO: 181 to 186), and/or has at least 50% sequence identity to SEQ ID NO: 2 or 4.

[0108] Concerning epimerase-related like polypeptides, portions useful in the methods of the invention, encode an epimerase-related like polypeptide as defined herein, and have substantially the same biological activity as the amino acid sequences given in Table A2 of the Examples section. Preferably, the portion is a portion of any one of the nucleic acids given in Table A2 of the Examples section, or is a portion of a nucleic acid encoding an orthologue or paralogue of any one of the amino acid sequences given in Table A2 of the Examples section. Preferably the portion is at least 850, 900, 950, 1000, 1050, 1100, 1150, 1200, 1250, 1300, 1350, 1400, 1450, 1500, 1550, consecutive nucleotides in length, the consecutive nucleotides being of any one of the nucleic acid sequences given in Table A2 of the Examples section, or of a nucleic acid encoding an orthologue or paralogue of any one of the amino acid sequences given in Table A2 of the Examples section. Most preferably the portion is a portion of the nucleic acid of SEQ ID NO: 197.

[0109] Preferably, the portion encodes a fragment of an amino acid sequence which has one or more of the following characteristics:
[0110] when used in the construction of a phylogenetic tree, such as the one depicted in FIG. 10, clusters with the group of polypeptides comprising the amino acid sequence represented by SEQ ID NO: 198 rather than with any other group;
[0111] comprises one or more of the following domains SSF53383, PTHR11601; PF00266, and G3DSA:3.40.640.10
[0112] comprises any one or more of the motifs 7 to 13 (as represented by SEQ ID NO 273, 274, 275, 280, 281, 282, 283, respectively) as provided herein, and
[0113] has at least 40% sequence identity to SEQ ID NO: 198.

[0114] Concerning PLPCase polypeptides, portions useful in the methods of the invention, encode a PLPCase polypeptide as defined herein, and have substantially the same biological activity as the amino acid sequences given in Table A3 of the Examples section. Preferably, the portion is a portion of any one of the nucleic acids given in Table A3 of the Examples section, or is a portion of a nucleic acid encoding an orthologue or paralogue of any one of the amino acid sequences given in Table A3 of the Examples section. Preferably the portion is at least 350, 400, 450, 500, 550, 600, 650, 700, 750, 780 consecutive nucleotides in length, the consecutive nucleotides being of any one of the nucleic acid sequences given in Table A3 of the Examples section, or of a nucleic acid encoding an orthologue or paralogue of any one of the amino acid sequences given in Table A3 of the Examples section. Most preferably the portion is a portion of the nucleic acid of SEQ ID NO: 284. Preferably, the portion encodes a fragment of an amino acid sequence which, when used in the construction of a phylogenetic tree, such as the one depicted in FIG. 14, clusters with the group of PLPCase polypeptides comprising the amino acid sequence represented by SEQ ID NO: 285 rather than with any other group, and/or comprises motifs any of the motifs 14 to 16, preferably any of the motifs 17 to 19, or preferably any of the motifs 20 to 22, more preferably comprises any of the motifs 23 to 25, and/or has phospholipase and/or carboxylesterase biological activity, and/or has at least 60% sequence identity to SEQ ID NO: 285.

[0115] Another nucleic acid variant useful in the methods of the invention is a nucleic acid capable of hybridising, under reduced stringency conditions, preferably under stringent conditions, with a nucleic acid encoding a DUF642 polypeptide, or an epimerase-related like polypeptide, or a PLPCase polypeptide as defined herein, or with a portion as defined herein.

[0116] According to the present invention, there is provided a method for enhancing yield-related traits in plants, comprising introducing and expressing in a plant a nucleic acid capable of hybridizing to the complement of a nucleic acid encoding any one of the proteins given in Table A of the Examples section, or to the complement of a nucleic acid encoding an orthologue, paralogue or homologue of any one of the proteins given in Table A of the Examples section.

[0117] Hybridising sequences useful in the methods of the invention encode a DUF642 polypeptide, or an epimerase-related like polypeptide, or a PLPCase polypeptide as defined herein, having substantially the same biological activity as the DUF642, epimerase-related like or PLPCase amino acid sequences given in Table A of the Examples section. Preferably, the hybridising sequence is capable of hybridising to the complement of a nucleic acid encoding any one of the proteins given in Table A of the Examples section, or to a portion of any of these sequences, a portion being as defined herein, or the hybridising sequence is capable of hybridising to the complement of a nucleic acid encoding an orthologue or paralogue of any one of the amino acid sequences given in Table A of the Examples section.

[0118] Concerning DUF642 polypeptides, the hybridising sequence is most preferably capable of hybridising to the complement of a nucleic acid encoding the polypeptide as represented by SEQ ID NO: 1 or to a portion thereof.

[0119] Preferably, the hybridising sequence encodes a polypeptide with an amino acid sequence which, when full-length and used in the construction of a phylogenetic tree, clusters with the group of DUF642 polypeptides comprising the amino acid sequence represented by SEQ ID NO: 2 and/or 4, rather than with any other group, comprises at least one of the motifs 1 to 6 (SEQ ID NO: 181 to 186), and/or has at least 50% sequence identity to SEQ ID NO: 2 or 4.

[0120] In one embodiment the hybridising sequence is capable of hybridising to the complement of a nucleic acid as represented by SEQ ID NO: 1 or SEQ ID NO: 3 or to a portion thereof under conditions of medium or high stringency, preferably high stringency as defined above. In another embodiment the hybridising sequence is capable of hybridising to the complement of a nucleic acid as represented by SEQ ID NO: 1 or SEQ ID NO: 3 under stringent conditions.

[0121] Concerning epimerase-related like polypeptides, the hybridising sequence is most preferably capable of hybridising to the complement of a nucleic acid encoding the polypeptide as represented by SEQ ID NO: 197 or to a portion thereof.

[0122] Preferably, the hybridising sequence encodes a polypeptide with an amino acid sequence which has one or more of the following characteristics:
[0123] when used in the construction of a phylogenetic tree, such as the one depicted in FIG. 10, clusters with the group of polypeptides comprising the amino acid sequence represented by SEQ ID NO: 198 rather than with any other group;
[0124] comprises one or more of the following domains SSF53383, PTHR11601; PF00266, and G3DSA:3.40.640.10
[0125] comprises any one or more of the motifs 7 to 13 (as represented by SEQ ID NO 273, 274, 275, 280, 281, 282, 283, respectively) as provided herein, and
[0126] has at least 40% sequence identity to SEQ ID NO: 198.

[0127] In one embodiment the hybridising sequence is capable of hybridising to the complement of a nucleic acid as represented by SEQ ID NO: 197 or to a portion thereof under conditions of medium or high stringency, preferably high stringency as defined above. In another embodiment the hybridising sequence is capable of hybridising to the complement of a nucleic acid as represented by SEQ ID NO: 197 under stringent conditions.

[0128] Concerning PLPCase polypeptides, the hybridising sequence is most preferably capable of hybridising to the complement of a nucleic acid encoding the polypeptide as represented by SEQ ID NO: 284 or to a portion thereof. In one embodiment, the hybridization conditions are of medium stringency, preferably of high stringency, as defined herein.

[0129] Preferably, the hybridising sequence encodes a polypeptide with an amino acid sequence which, when full-length and used in the construction of a phylogenetic tree, such as the one depicted in FIG. 14, clusters with the group of PLPCase polypeptides comprising the amino acid sequence represented by SEQ ID NO: 285 rather than with any other group, and/or comprises motifs any of the motifs 14 to 16, preferably any of the motifs 17 to 19, or preferably any of the motifs 20 to 22, more preferably comprises any of the motifs 23 to 25, and/or has phospholipase and/or carboxylesterase biological activity, and/or has at least 60% sequence identity to SEQ ID NO: 285.

[0130] Another nucleic acid variant useful in the methods of the invention is a splice variant encoding a DUF642 polypeptide, or an epimerase-related like polypeptide, or a PLPCase polypeptide as defined hereinabove, a splice variant being as defined herein.

[0131] According to the present invention, there is provided a method for enhancing yield-related traits in plants, comprising introducing and expressing in a plant a splice variant of any one of the nucleic acid sequences given in Table A of the Examples section, or a splice variant of a nucleic acid encoding an orthologue, paralogue or homologue of any of the amino acid sequences given in Table A of the Examples section.

[0132] Concerning DUF642 polypeptides, preferred splice variants are splice variants of a nucleic acid represented by SEQ ID NO: 1, or a splice variant of a nucleic acid encoding an orthologue or paralogue of SEQ ID NO: 2. Preferably, the amino acid sequence encoded by the splice variant, when used in the construction of a phylogenetic tree, clusters with the group of DUF642 polypeptides comprising the amino acid sequence represented by SEQ ID NO: 2 and/or 4, rather than with any other group, comprises at least one of the motifs 1 to 6 (SEQ ID NO: 181 to 186), and/or has at least 50% sequence identity to SEQ ID NO: 2 or 4.

[0133] Concerning epimerase-related like polypeptides, preferred splice variants are splice variants of a nucleic acid represented by SEQ ID NO: 197, or a splice variant of a nucleic acid encoding an orthologue or paralogue of SEQ ID NO: 198. Preferably, the amino acid sequence encoded by the splice variant, has one or more of the following characteristics:
[0134] when used in the construction of a phylogenetic tree, such as the one depicted in FIG. 10, clusters with the group of polypeptides comprising the amino acid sequence represented by SEQ ID NO: 198 rather than with any other group;
[0135] comprises one or more of the following domains SSF53383, PTHR11601; PF00266, and G3DSA:3.40.640.10
[0136] comprises any one or more of the motifs 7 to 13 (as represented by SEQ ID NO 273, 274, 275, 280, 281, 282, 283, respectively) as provided herein, and
[0137] has at least 40% sequence identity to SEQ ID NO: 198.

[0138] Concerning PLPCase polypeptides, preferred splice variants are splice variants of a nucleic acid represented by SEQ ID NO: 284, or a splice variant of a nucleic acid encoding an orthologue or paralogue of SEQ ID NO: 285. Preferably, the amino acid sequence encoded by the splice variant, when used in the construction of a phylogenetic tree, such as the one depicted in FIG. 14, clusters with the group of PLPCase polypeptides comprising the amino acid sequence represented by SEQ ID NO: 285 rather than with any other group, and/or comprises motifs any of the motifs 14 to 16, preferably any of the motifs 17 to 19, or preferably any of the motifs 20 to 22, more preferably comprises any of the motifs 23 to 25, and/or has phospholipase and/or carboxylesterase biological activity, and/or has at least 60% sequence identity to SEQ ID NO: 285.

[0139] Another nucleic acid variant useful in performing the methods of the invention is an allelic variant of a nucleic acid encoding a DUF642 polypeptide, or an epimerase-related like polypeptide, or a PLPCase polypeptide as defined herein, an allelic variant being as defined herein.

[0140] According to the present invention, there is provided a method for enhancing yield-related traits in plants, comprising introducing and expressing in a plant an allelic variant of any one of the nucleic acids given in Table A of the Examples section, or comprising introducing and expressing in a plant an allelic variant of a nucleic acid encoding an orthologue, paralogue or homologue of any of the amino acid sequences given in Table A of the Examples section.

[0141] Concerning DUF642 polypeptides, the polypeptides encoded by allelic variants useful in the methods of the present invention have substantially the same biological activity as the DUF642 polypeptide of SEQ ID NO: 2 and any of the amino acids depicted in Table A1 of the Examples section. Allelic variants exist in nature, and encompassed within the methods of the present invention is the use of these natural alleles. Preferably, the allelic variant is an allelic variant of SEQ ID NO: 1 or an allelic variant of a nucleic acid encoding an orthologue or paralogue of SEQ ID NO: 2. Preferably, the amino acid sequence encoded by the allelic variant, when used in the construction of a phylogenetic tree, clusters with the DUF642 polypeptides comprising the amino acid sequence represented by SEQ ID NO: 2 and/or 4, rather than with any other group, comprises at least one of the motifs 1 to 6 (SEQ ID NO: 181 to 186), and/or has at least 50% sequence identity to SEQ ID NO: 2 or 4.

[0142] Concerning epimerase-related like polypeptides, the polypeptides encoded by allelic variants useful in the methods of the present invention have substantially the same biological activity as the epimerase-related like polypeptide of SEQ ID NO: 198 and any of the amino acids depicted in Table A2 of the Examples section. Allelic variants exist in nature, and encompassed within the methods of the present invention is the use of these natural alleles. Preferably, the allelic variant is an allelic variant of SEQ ID NO: 197 or an allelic variant of a nucleic acid encoding an orthologue or paralogue of SEQ ID NO: 198. Preferably, the amino acid sequence encoded by the allelic variant has one or more of the following characteristics:
[0143] when used in the construction of a phylogenetic tree, such as the one depicted in FIG. 10, clusters with the group of polypeptides comprising the amino acid sequence represented by SEQ ID NO: 198 rather than with any other group;
[0144] comprises one or more of the following domains SSF53383, PTHR11601; PF00266, and G3DSA:3.40.640.10
[0145] comprises any one or more of the motifs 7 to 13 (as represented by SEQ ID NO 273, 274, 275, 280, 281, 282, 283, respectively) as provided herein, and
[0146] has at least 40% sequence identity to SEQ ID NO: 198.

[0147] Concerning PLPCase polypeptides, the polypeptides encoded by allelic variants useful in the methods of the present invention have substantially the same biological activity as the PLPCase polypeptide of SEQ ID NO: 285 and any of the amino acids depicted in Table A3 of the Examples section. Allelic variants exist in nature, and encompassed within the methods of the present invention is the use of these natural alleles. Preferably, the allelic variant is an allelic variant of SEQ ID NO: 284 or an allelic variant of a nucleic acid encoding an orthologue or paralogue of SEQ ID NO: 285. Preferably, the amino acid sequence encoded by the allelic variant, when used in the construction of a phylogenetic tree, such as the one depicted in FIG. 14, clusters with the PLPCase polypeptides comprising the amino acid sequence represented by SEQ ID NO: 285 rather than with any other group, and/or comprises motifs any of the motifs 14 to 16, preferably any of the motifs 17 to 19, or preferably any of the motifs 20 to 22, more preferably comprises any of the motifs 23 to 25, and/or has phospholipase and/or carboxylesterase biological activity, and/or has at least 60% sequence identity to SEQ ID NO: 285.

[0148] Gene shuffling or directed evolution may also be used to generate variants of nucleic acids encoding DUF642 polypeptides, or epimerase-related like polypeptides, or PLPCase polypeptides as defined herein; the term “gene shuffling” being as defined herein.

[0149] According to the present invention, there is provided a method for enhancing yield-related traits in plants, comprising introducing and expressing in a plant a variant of any one of the nucleic acid sequences given in Table A of the Examples section, or comprising introducing and expressing in a plant a variant of a nucleic acid encoding an orthologue, paralogue or homologue of any of the amino acid sequences given in Table A of the Examples section, which variant nucleic acid is obtained by gene shuffling.

[0150] Concerning DUF642 polypeptides, the amino acid sequence encoded by the variant nucleic acid obtained by gene shuffling, when used in the construction of a phylogenetic tree, preferably clusters with the group of DUF642 polypeptides comprising the amino acid sequence represented by SEQ ID NO: 2 and/or 4, rather than with any other group, comprises at least one of the motifs 1 to 6 (SEQ ID NO: 181 to 186), and/or has at least 50% sequence identity to SEQ ID NO: 2 or 4.

[0151] Concerning epimerase-related like polypeptides, the amino acid sequence encoded by the variant nucleic acid obtained by gene shuffling, preferably is an amino acid sequence which has one or more of the following characteristics:
[0152] when used in the construction of a phylogenetic tree, such as the one depicted in FIG. 10, clusters with the group of polypeptides comprising the amino acid sequence represented by SEQ ID NO: 198 rather than with any other group;
[0153] comprises one or more of the following domains SSF53383, PTHR11601; PF00266, and G3DSA:3.40.640.10
[0154] comprises any one or more of the motifs 7 to 13 (as represented by SEQ ID NO 273, 274, 275, 280, 281, 282, 283, respectively) as provided herein, and
[0155] has at least 40% sequence identity to SEQ ID NO: 198.

[0156] Concerning PLPCase polypeptides, the amino acid sequence encoded by the variant nucleic acid obtained by gene shuffling, when used in the construction of a phylogenetic tree such as the one depicted in FIG. 14, preferably clusters with the group of PLPCase polypeptides comprising the amino acid sequence represented by SEQ ID NO: 285 rather than with any other group, and/or comprises motifs any of the motifs 14 to 16, preferably any of the motifs 17 to 19, or preferably any of the motifs 20 to 22, more preferably comprises any of the motifs 23 to 25, and/or has phospholipase and/or carboxylesterase biological activity, and/or has at least 60% sequence identity to SEQ ID NO: 285.

[0157] Furthermore, nucleic acid variants may also be obtained by site-directed mutagenesis. Several methods are available to achieve site-directed mutagenesis, the most common being PCR based methods (Current Protocols in Molecular Biology. Wiley Eds.).

[0158] Concerning DUF642 polypeptides, nucleic acids encoding DUF642 polypeptides may be derived from any natural or artificial source. The nucleic acid may be modified from its native form in composition and/or genomic environment through deliberate human manipulation. Preferably the DUF642 polypeptide-encoding nucleic acid is from a plant, further preferably from a monocotyledonous plant, more preferably from the family Poaceae, most preferably the nucleic acid is from Oryza sativa.

[0159] For example, the nucleic acid encoding the DUF642 polypeptide of SEQ ID NO:2 can be generated from the nucleic acid encoding the DUF642 polypeptide of SEQ ID NO:2 by alteration of several nucleotides, e.g. by site-directed mutagenesis using PCR based methods (see Current Protocols in Molecular Biology, John Wiley & Sons, N.Y. (1989 and yearly updates)). DUF642 polypeptides differing from the sequence of SEQ ID NO: 2 or SEQ ID NO: 4 by one or several amino acids may be used to increase the yield of plants in the methods and constructs and plants of the invention.

[0160] Concerning epimerase-related like polypeptides, nucleic acids encoding epimerase-related like polypeptides may be derived from any natural or artificial source. The nucleic acid may be modified from its native form in composition and/or genomic environment through deliberate human manipulation. Preferably the epimerase-related like polypeptide-encoding nucleic acid is from a plant, further preferably from a dicotyledonous plant, further preferably from the family Salicaceae, more preferably the nucleic acid is from the genus Populus, and most preferably the nucleic acid is from Populus trichocarpa.

[0161] Concerning PLPCase polypeptides, nucleic acids encoding PLPCase polypeptides may be derived from any natural or artificial source. The nucleic acid may be modified from its native form in composition and/or genomic environment through deliberate human manipulation. Preferably the PLPCase polypeptide-encoding nucleic acid is from a plant, further preferably from a dicotyledonous plant, more preferably from the family Fabaceae, more preferably from the genus Medicago, most preferably the nucleic acid is from Medicago truncatula.

[0162] PLPCase polypeptides differing from the sequence of SEQ ID NO: 285 by one or several amino acids (substitution(s), insertion(s) and/or deletion(s) as defined above) may equally be useful to increase the yield of plants in the methods and constructs and plants of the invention.

[0163] In another embodiment the present invention extends to recombinant chromosomal DNA comprising a nucleic acid sequence useful in the methods of the invention, wherein said nucleic acid is present in the chromosomal DNA as a result of recombinant methods, i.e. said nucleic acid is not in the chromosomal DNA in its native surrounding. Said recombinant chromosomal DNA may be a chromosome of native origin, with said nucleic acid inserted by recombinant means, or it may be a mini-chromosome or a non-native chromosomal structure, e.g. or an artificial chromosome. The nature of the chromosomal DNA may vary, as long as it allows for stable passing on to successive generations of the recombinant nucleic acid useful in the methods of the invention, and allows for expression of said nucleic acid in a living plant cell resulting in increased yield or increased yield related traits of the plant cell or a plant comprising the plant cell. In a further embodiment the recombinant chromosomal DNA of the invention is comprised in a plant cell.

[0164] Performance of the methods of the invention gives plants having enhanced yield-related traits. In particular performance of the methods of the invention gives plants having increased yield, especially increased seed yield relative to control plants. The terms “yield” and “seed yield” are described in more detail in the “definitions” section herein.

[0165] Reference herein to enhanced yield-related traits is taken to mean an increase of early vigour and/or in biomass (weight) of one or more parts of a plant, which may include (i) aboveground parts and preferably aboveground harvestable parts and/or (ii) parts below ground and preferably harvestable below ground. In particular, such harvestable parts are seeds, and performance of the methods of the invention results in plants having increased seed yield relative to the seed yield of control plants.

[0166] The present invention provides a method for increasing yield, especially seed yield of plants, relative to control plants, which method comprises modulating expression in a plant of a nucleic acid encoding a DUF642 polypeptide as defined herein.

[0167] The present invention also provides a method for increasing yield, and more particularly increased seed yield and/or increased biomass, relative to control plants, which method comprises modulating expression in a plant of a nucleic acid encoding an epimerase-related like polypeptide as defined herein.

[0168] The present invention also provides a method for increasing yield, especially enhancing root biomass of plants, relative to control plants, which method comprises modulating expression in a plant of a nucleic acid encoding a PLPCase polypeptide as defined herein.

[0169] According to a preferred feature of the present invention, performance of the methods of the invention gives plants having an increased growth rate relative to control plants. Therefore, according to the present invention, there is provided a method for increasing the growth rate of plants, which method comprises modulating expression in a plant of a nucleic acid encoding a DUF642 polypeptide, or an epimerase-related like polypeptide, or a PLPCase polypeptide as defined herein.

[0170] Performance of the methods of the invention gives plants grown under non-stress conditions or under mild drought conditions increased yield relative to control plants grown under comparable conditions. Therefore, according to the present invention, there is provided a method for increasing yield in plants grown under non-stress conditions or under mild drought conditions, which method comprises modulating expression in a plant of a nucleic acid encoding a DUF642 polypeptide, or an epimerase-related like polypeptide, or a PLPCase polypeptide.

[0171] Performance of the methods of the invention gives plants grown under conditions of drought, increased yield relative to control plants grown under comparable conditions. Therefore, according to the present invention, there is provided a method for increasing yield in plants grown under conditions of drought which method comprises modulating expression in a plant of a nucleic acid encoding a DUF642 polypeptide, or an epimerase-related like polypeptide, or a PLPCase polypeptide.

[0172] Performance of the methods of the invention gives plants grown under conditions of nutrient deficiency, particularly under conditions of nitrogen deficiency, increased yield relative to control plants grown under comparable conditions. Therefore, according to the present invention, there is provided a method for increasing yield-related traits in plants grown under conditions of nutrient deficiency, which method comprises modulating expression in a plant of a nucleic acid encoding a DUF642 polypeptide, or an epimerase-related like polypeptide, or a PLPCase polypeptide.

[0173] Performance of the methods of the invention gives plants grown under conditions of salt stress, increased yield relative to control plants grown under comparable conditions. Therefore, according to the present invention, there is provided a method for increasing yield in plants grown under conditions of salt stress, which method comprises modulating expression in a plant of a nucleic acid encoding a DUF642 polypeptide, or an epimerase-related like polypeptide, or a PLPCase polypeptide.

[0174] The invention also provides genetic constructs and vectors to facilitate introduction and/or expression in plants of nucleic acids encoding DUF642 polypeptides, or epimerase-related like polypeptides, or PLPCase polypeptides. The gene constructs may be inserted into vectors, which may be commercially available, suitable for transforming into plants or host cells and suitable for expression of the gene of interest in the transformed cells. The invention also provides use of a gene construct as defined herein in the methods of the invention.

[0175] More specifically, the present invention provides a construct comprising:
[0176] (a) a nucleic acid encoding a DUF642 polypeptide, or an epimerase-related like polypeptide, or a PLPCase polypeptide as defined herein;
[0177] (b) one or more control sequences capable of driving expression of the nucleic acid sequence of (a); and optionally
[0178] (c) a transcription termination sequence.

[0179] Preferably, the nucleic acid encoding a DUF642 polypeptide, or an epimerase-related like polypeptide, or a PLPCase polypeptide is as defined herein. The term “control sequence” and “termination sequence” are as defined herein.

[0180] In a preferred embodiment, the present invention provides a construct comprising:
[0181] (a) a nucleic acid encoding a PLPCase polypeptide as represented by any of SEQ ID NO: 299, 303, 305, 313, 317, 337 or 347;
[0182] (b) one or more control sequences capable of driving expression of the nucleic acid sequence of (a); and optionally
[0183] (c) a transcription termination sequence.

[0184] The genetic construct of the invention may be comprised in a host cell, plant cell, seed, agricultural product or plant. Plants or host cells are transformed with a genetic construct such as a vector or an expression cassette comprising any of the nucleic acids described herein. Thus the invention furthermore provides plants or host cells transformed with a construct as described above. In particular, the invention provides plants transformed with a construct as described above, which plants have increased yield-related traits as described herein.

[0185] In one embodiment the genetic construct of the invention confers increased yield or yield related traits(s) to a living plant cell when it has been introduced into said plant cell and express the nucleic acid encoding the DUF642 polypeptide, or the epimerase-related like polypeptide, or the PLPCase polypeptide, comprised in the genetic construct.

[0186] The skilled artisan is well aware of the genetic elements that must be present on the genetic construct in order to successfully transform, select and propagate host cells containing the sequence of interest. The sequence of interest is operably linked to one or more control sequences (at least to a promoter).

[0187] The promoter in such a genetic construct may be a non-native promoter to the nucleic acid described above, i.e. a promoter which does not regulate the expression of the herein disclosed polynucleotides in its native surrounding.

[0188] Advantageously, any type of promoter, whether natural or synthetic, may be used to drive expression of the nucleic acid sequence, but preferably the promoter is of plant origin. A constitutive promoter is particularly useful in the methods. Preferably the constitutive promoter is a ubiquitous constitutive promoter of medium strength. See the “Definitions” section herein for definitions of the various promoter types.

[0189] The constitutive promoter is preferably a ubiquitous constitutive promoter of medium strength. More preferably it is a plant derived promoter, e.g. a promoter of plant chromosomal origin, such as a GOS2 promoter or a promoter of substantially the same strength and having substantially the same expression pattern (a functionally equivalent promoter), more preferably the promoter is the promoter GOS2 promoter from rice. Further preferably the constitutive promoter is represented by a nucleic acid sequence substantially similar to SEQ ID NO: 189, or SEQ ID NO: 278, or SEQ ID NO: 361, most preferably the constitutive promoter is as represented by SEQ ID NO: 189, or SEQ ID NO: 278, or SEQ ID NO: 361. See the “Definitions” section herein for further examples of constitutive promoters.

[0190] Concerning DUF642 polypeptides, it should be clear that the applicability of the present invention is not restricted to the DUF642 polypeptide-encoding nucleic acid represented by SEQ ID NO: 1 or 3, nor is the applicability of the invention restricted to expression of a DUF642 polypeptide-encoding nucleic acid when driven by a constitutive promoter.

[0191] Concerning epimerase-related like polypeptides, it should be clear that the applicability of the present invention is not restricted to the epimerase-related like polypeptide-encoding nucleic acid represented by SEQ ID NO: 197, nor is the applicability of the invention restricted to expression of an epimerase-related like polypeptide-encoding nucleic acid when driven by a constitutive promoter, or when driven by a root-specific promoter.

[0192] Concerning PLPCase polypeptides, it should be clear that the applicability of the present invention is not restricted to the PLPCase polypeptide-encoding nucleic acid represented by SEQ ID NO: 284, nor is the applicability of the invention restricted to expression of a PLPCase polypeptide-encoding nucleic acid when driven by a constitutive promoter.

[0193] Concerning DUF642 polypeptides, optionally, one or more terminator sequences may be used in the construct introduced into a plant. Preferably, the construct comprises an expression cassette comprising a GOS2 promoter, substantially similar to SEQ ID NO: 189, operably linked to the nucleic acid encoding the DUF642 polypeptide. More preferably, the construct comprises a zein terminator (t-zein) linked to the 3′ end of the DUF642 coding sequence. Most preferably, the expression cassette comprises a sequence having in increasing order of preference at least 95%, at least 96%, at least 97%, at least 98%, at least 99% identity to the sequence represented by SEQ ID NO: 187 or 188 (pPRO::DUF642::t-zein sequence). Furthermore, one or more sequences encoding selectable markers may be present on the construct introduced into a plant.

[0194] Concerning epimerase-related like polypeptides, optionally, one or more terminator sequences may be used in the construct introduced into a plant. Preferably, the construct comprises an expression cassette comprising a GOS2 promoter, substantially similar to SEQ ID NO: 278, operably linked to the nucleic acid encoding the epimerase-related like polypeptide. More preferably, the construct comprises a zein terminator (t-zein) linked to the 3′ end of the coding sequence of an epimerase-related like polypeptide. Most preferably, the expression cassette comprises a sequence having in increasing order of preference at least 95%, at least 96%, at least 97%, at least 98%, at least 99% identity to the sequence represented by SEQ ID NO: 279 (pPRO::ERL::t-zein sequence). Furthermore, one or more sequences encoding selectable markers may be present on the construct introduced into a plant.

[0195] Concerning PLPCase polypeptides, optionally, one or more terminator sequences may be used in the construct introduced into a plant. Preferably, the construct comprises an expression cassette comprising a GOS2 promoter, substantially similar to SEQ ID NO: 361, operably linked to the nucleic acid encoding the PLPCase polypeptide. More preferably, the expression cassette comprises the sequence represented by SEQ ID NO: 360 (pGOS2::PLPCase::t-zein sequence). Furthermore, one or more sequences encoding selectable markers may be present on the construct introduced into a plant.

[0196] According to a preferred feature of the invention, the modulated expression is increased expression. Methods for increasing expression of nucleic acids or genes, or gene products, are well documented in the art and examples are provided in the definitions section.

[0197] As mentioned above, a preferred method for modulating expression of a nucleic acid encoding a DUF642 polypeptide, or a epimerase-related like polypeptide, or a PLPCase polypeptide is by introducing and expressing in a plant a nucleic acid encoding a DUF642 polypeptide, or a epimerase-related like polypeptide, or a PLPCase polypeptide; however the effects of performing the method, i.e. enhancing yield-related traits may also be achieved using other well known techniques, including but not limited to T-DNA activation tagging, TILLING, homologous recombination. A description of these techniques is provided in the definitions section.

[0198] The invention also provides a method for the production of transgenic plants having enhanced yield-related traits relative to control plants, comprising introduction and expression in a plant of any nucleic acid encoding a DUF642 polypeptide, or a epimerase-related like polypeptide, or a PLPCase polypeptide as defined herein.

[0199] More specifically, the present invention provides a method for the production of transgenic plants having enhanced yield-related traits, particularly increased yield, more particularly increased seed yield, which method comprises:
[0200] (i) introducing and expressing in a plant or plant cell a DUF642 polypeptide-encoding nucleic acid or a genetic construct comprising a DUF642 polypeptide-encoding nucleic acid; and
[0201] (ii) cultivating the plant cell under conditions promoting plant growth and development.

[0202] The nucleic acid of (i) may be any of the nucleic acids capable of encoding a DUF642 polypeptide as defined herein.

[0203] More specifically, the present invention also provides a method for the production of transgenic plants having enhanced yield-related traits, particularly increased yield, and more particularly increased seed yield and/or increased biomass, which method comprises:
[0204] (i) introducing and expressing in a plant or plant cell an epimerase-related like polypeptide-encoding nucleic acid or a genetic construct comprising an epimerase-related like polypeptide-encoding nucleic acid; and
[0205] (ii) cultivating the plant cell under conditions promoting plant growth and development.

[0206] The nucleic acid of (i) may be any of the nucleic acids capable of encoding an epimerase-related like polypeptide as defined herein.

[0207] More specifically, the present invention also provides a method for the production of transgenic plants having enhanced yield-related traits, particularly increased root biomass, which method comprises:
[0208] (i) introducing and expressing in a plant or plant cell a PLPCase polypeptide-encoding nucleic acid or a genetic construct comprising a PLPCase polypeptide-encoding nucleic acid; and
[0209] (ii) cultivating the plant cell under conditions promoting plant growth and development.

[0210] The nucleic acid of (i) may be any of the nucleic acids capable of encoding a PLPCase polypeptide as defined herein.

[0211] Cultivating the plant cell under conditions promoting plant growth and development, may or may not include regeneration and/or growth to maturity. Accordingly, in a particular embodiment of the invention, the plant cell transformed by the method according to the invention is regenerable into a transformed plant. In another particular embodiment, the plant cell transformed by the method according to the invention is not regenerable into a transformed plant, i.e. cells that are not capable to regenerate into a plant using cell culture techniques known in the art. While plants cells generally have the characteristic of totipotency, some plant cells can not be used to regenerate or propagate intact plants from said cells. In one embodiment of the invention the plant cells of the invention are such cells. In another embodiment the plant cells of the invention are plant cells that do not sustain themselves in an autotrophic way.

[0212] The nucleic acid may be introduced directly into a plant cell or into the plant itself (including introduction into a tissue, organ or any other part of a plant). According to a preferred feature of the present invention, the nucleic acid is preferably introduced into a plant or plant cell by transformation. The term “transformation” is described in more detail in the “definitions” section herein.

[0213] In one embodiment the present invention extends to any plant cell or plant produced by any of the methods described herein, and to all plant parts and propagules thereof.

[0214] The present invention encompasses plants or parts thereof (including seeds) obtainable by the methods according to the present invention. The plants or plant parts or plant cells comprise a nucleic acid transgene encoding a DUF642 polypeptide, or a epimerase-related like polypeptide, or a PLPCase polypeptide as defined herein, preferably in a genetic construct such as an expression cassette. The present invention extends further to encompass the progeny of a primary transformed or transfected cell, tissue, organ or whole plant that has been produced by any of the aforementioned methods, the only requirement being that progeny exhibit the same genotypic and/or phenotypic characteristic(s) as those produced by the parent in the methods according to the invention.

[0215] In a further embodiment the invention extends to seeds comprising the expression cassettes of the invention, the genetic constructs of the invention, or the nucleic acids encoding the DUF642 polypeptides, or the epimerase-related like polypeptides, or the PLPCase polypeptides and/or the DUF642 polypeptides, or the epimerase-related like polypeptides, or the PLPCase polypeptides as described above.

[0216] The invention also includes host cells containing an isolated nucleic acid encoding a DUF642 polypeptide, or a epimerase-related like polypeptide, or a PLPCase polypeptide as defined herein. In one embodiment host cells according to the invention are plant cells, yeasts, bacteria or fungi. Host plants for the nucleic acids, construct, expression cassette or the vector used in the method according to the invention are, in principle, advantageously all plants which are capable of synthesizing the polypeptides used in the inventive method. In a particular embodiment the plant cells of the invention overexpress the nucleic acid molecule of the invention.

[0217] The methods of the invention are advantageously applicable to any plant, in particular to any plant as defined herein. Plants that are particularly useful in the methods of the invention include all plants which belong to the superfamily Viridiplantae, in particular monocotyledonous and dicotyledonous plants including fodder or forage legumes, ornamental plants, food crops, trees or shrubs. According to an embodiment of the present invention, the plant is a crop plant. Examples of crop plants include but are not limited to chicory, carrot, cassava, trefoil, soybean, beet, sugar beet, sunflower, canola, alfalfa, rapeseed, linseed, cotton, tomato, potato and tobacco. According to another embodiment of the present invention, the plant is a monocotyledonous plant. Examples of monocotyledonous plants include sugarcane. According to another embodiment of the present invention, the plant is a cereal. Examples of cereals include rice, maize, wheat, barley, millet, rye, triticale, sorghum, emmer, spelt, einkorn, teff, milo and oats. In a particular embodiment the plants used in the methods of the invention are selected from the group consisting of maize, wheat, rice, soybean, cotton, oilseed rape including canola, sugarcane, sugar beet and alfalfa. Advantageously the methods of the invention are more efficient than the known methods, because the plants of the invention have increased yield and/or tolerance to an environmental stress compared to control plants used in comparable methods. In another embodiment of the present invention the plants of the invention and the plants used in the methods of the invention are sugarcane plants with increased biomass and/or increased sugar content of the shoot. In yet another embodiment of the present invention the plants of the invention and the plants used in the methods of the invention are sugarbeet plants with increased biomass and/or increased sugar content of the beets.

[0218] The invention also extends to harvestable parts of a plant such as, but not limited to seeds, leaves, fruits, flowers, stems, roots, rhizomes, tubers and bulbs, which harvestable parts comprise a recombinant nucleic acid encoding a DUF642 polypeptide, or a epimerase-related like polypeptide, or a PLPCase polypeptide. The invention furthermore relates to products derived or produced, preferably directly derived or produced, from a harvestable part of such a plant, such as dry pellets, meal or powders, oil, fat and fatty acids, starch or proteins.

[0219] The invention also includes methods for manufacturing a product comprising a) growing the plants of the invention and b) producing said product from or by the plants of the invention or parts thereof, including seeds. In a further embodiment the methods comprise the steps of a) growing the plants of the invention, b) removing the harvestable parts as described herein from the plants and c) producing said product from, or with the harvestable parts of plants according to the invention.

[0220] Examples of such methods would be growing corn plants of the invention, harvesting the corn cobs and remove the kernels. These may be used as feedstuff or processed to starch and oil as agricultural products. The product may be produced at the site where the plant has been grown, or the plants or parts thereof may be removed from the site where the plants have been grown to produce the product. Typically, the plant is grown, the desired harvestable parts are removed from the plant, if feasible in repeated cycles, and the product made from the harvestable parts of the plant. The step of growing the plant may be performed only once each time the methods of the invention is performed, while allowing repeated times the steps of product production e.g. by repeated removal of harvestable parts of the plants of the invention and if necessary further processing of these parts to arrive at the product. It is also possible that the step of growing the plants of the invention is repeated and plants or harvestable parts are stored until the production of the product is then performed once for the accumulated plants or plant parts. Also, the steps of growing the plants and producing the product may be performed with an overlap in time, even simultaneously to a large extent, or sequentially. Generally the plants are grown for some time before the product is produced.

[0221] In one embodiment the products produced by the methods of the invention are plant products such as, but not limited to, a foodstuff, feedstuff, a food supplement, feed supplement, fiber, cosmetic or pharmaceutical. In another embodiment the methods for production are used to make agricultural products such as, but not limited to, plant extracts, proteins, amino acids, carbohydrates, fats, oils, polymers, vitamins, and the like.

[0222] In yet another embodiment the polynucleotides or the polypeptides of the invention are comprised in an agricultural product. In a particular embodiment the nucleic acid sequences and protein sequences of the invention may be used as product markers, for example where an agricultural product was produced by the methods of the invention. Such a marker can be used to identify a product to have been produced by an advantageous process resulting not only in a greater efficiency of the process but also improved quality of the product due to increased quality of the plant material and harvestable parts used in the process. Such markers can be detected by a variety of methods known in the art, for example but not limited to PCR based methods for nucleic acid detection or antibody based methods for protein detection.

[0223] The present invention also encompasses use of nucleic acids encoding DUF642 polypeptides, epimerase-related like polypeptides, or PLPCase polypeptides polypeptides as described herein and use of these DUF642 polypeptides, or epimerase-related like polypeptides, or PLPCase polypeptides in enhancing any of the aforementioned yield-related traits in plants. For example, nucleic acids encoding DUF642 polypeptides, or epimerase-related like polypeptides, or PLPCase polypeptides described herein, or the DUF642 polypeptides, or the epimerase-related like polypeptides, or the PLPCase polypeptides themselves, may find use in breeding programmes in which a DNA marker is identified which may be genetically linked to a DUF642 polypeptide-encoding gene, or an epimerase-related like polypeptide-encoding gene, or a PLPCase polypeptide-encoding gene. The nucleic acids/genes, or the DUF642 polypeptides, or the epimerase-related like polypeptides, or the PLPCase polypeptides themselves may be used to define a molecular marker. This DNA or protein marker may then be used in breeding programmes to select plants having enhanced yield-related traits as defined herein in the methods of the invention. Furthermore, allelic variants of a DUF642 polypeptide-encoding nucleic acid/gene, or an epimerase-related like polypeptide-encoding nucleic acid/gene, or a PLPCase polypeptide-encoding nucleic acid/gene may find use in marker-assisted breeding programmes. Nucleic acids encoding DUF642 polypeptides, or epimerase-related like polypeptides, or PLPCase polypeptides may also be used as probes for genetically and physically mapping the genes that they are a part of, and as markers for traits linked to those genes. Such information may be useful in plant breeding in order to develop lines with desired phenotypes.

[0224] Concerning DUF642 polypeptides, in one embodiment any comparison to determine sequence identity percentages is performed
[0225] in the case of a comparison of nucleic acids over the entire coding region of SEQ ID NO: 1 or SEQ ID NO: 3, or
[0226] in the case of a comparison of polypeptide sequences over the entire length of SEQ ID NO: 2 or SEQ ID NO: 4.

[0227] For example, a sequence identity of 50% sequence identity in this embodiment means that over the entire coding region of SEQ ID NO: 1, 50 percent of all bases are identical between the sequence of SEQ ID NO: 1 and the related sequence. Similarly, in this embodiment a polypeptide sequence is 50% identical to the polypeptide sequence of SEQ ID NO: 2, when 50 percent of the amino acids residues of the sequence as represented in SEQ ID NO: 2, are found in the polypeptide tested when comparing from the starting methionine to the end of the sequence of SEQ ID NO: 2.

[0228] Concerning epimerase-related like polypeptides, in one embodiment any comparison to determine sequence identity percentages is performed
[0229] in the case of a comparison of nucleic acids over the entire coding region of SEQ ID NO: 197, or
[0230] in the case of a comparison of polypeptide sequences over the entire length of SEQ ID NO: 198.

[0231] For example, a sequence identity of 50% sequence identity in this embodiment means that over the entire coding region of SEQ ID NO: 197, 50 percent of all bases are identical between the sequence of SEQ ID NO: 197 and the related sequence. Similarly, in this embodiment a polypeptide sequence is 50% identical to the polypeptide sequence of SEQ ID NO: 198, when 50 percent of the amino acids residues of the sequence as represented in SEQ ID NO: 198, are found in the polypeptide tested when comparing from the starting methionine to the end of the sequence of SEQ ID NO: 198.

[0232] Moreover concerning DUF642 polypeptides, the present invention relates to the following specific embodiments:
[0233] 1. A method for enhancing yield-related traits in plants relative to control plants, comprising modulating expression in a plant of a nucleic acid encoding a DUF642 polypeptide, wherein said DUF642 polypeptide comprises an InterPro accession IPR006946 DUF642 domain, preferably said DUF642 polypeptide comprises the signature sequence FSAARTCAQ (SEQ ID NO: 194).
[0234] 2. Method according to embodiment 1, wherein said modulated expression is effected by introducing and expressing in a plant said nucleic acid encoding said DUF642 polypeptide.
[0235] 3. Method according to embodiment 1 or 2, wherein said enhanced yield-related traits comprise increased yield relative to control plants, and preferably comprise increased biomass and/or increased seed yield relative to control plants.
[0236] 4. Method according to any one of embodiments 1 to 3, wherein said enhanced yield-related traits are obtained under non-stress conditions.
[0237] 5. Method according to any of embodiments 1 to 4, wherein said DUF642 polypeptide comprises one or more of the following motifs:

| (SEQ ID NO: 181) | | |
|---|---|---|
| (i) | Motif 1: | N[LAM][VL]KNG[DG]FEEGP[WYH][MI][FLI]P[NG][TS][STR][WL]GVL |
| | | [LVI]P[PTS][NKM][LQDV][EDV][DE][ED][THY]S[PS]L[PS][GP]W[IMT][IV], |
| (SEQ ID NO: 182) | | |
| (ii) | Motif 2: | [VLA][EKAT][KPR]G[SAM][LRH]Y[SA][LIV][TI]F[SG]A[AS]RTCAQ[DLAS] |
| | | E[SVRL]L[NR][VI], |
| (SEQ ID NO: 183) | | |
| (iii) | Motif 3: | D[PE][AT]CGP[LI][IL]D[AS][VIF]AI[KR] |

[0238] 6. Method according to any one of embodiments 1 to 5, wherein said nucleic acid encoding a DUF642 is of plant origin, preferably from a monocotyledonous plant, further preferably from the family Poaceae, more preferably from the genus Oryza, most preferably from Oryza sativa.
[0239] 7. Method according to any one of embodiments 1 to 6, wherein said nucleic acid encoding a DUF642 encodes any one of the polypeptides listed in Table A1 or is a portion of such a nucleic acid, or a nucleic acid capable of hybridising with such a nucleic acid.
[0240] 8. Method according to any one of embodiments 1 to 7, wherein said nucleic acid sequence encodes an orthologue or paralogue of any of the polypeptides given in Table A1.
[0241] 9. Method according to any one of embodiments 1 to 8, wherein said nucleic acid encodes the polypeptide represented by SEQ ID NO: 2 or SEQ ID NO: 4 or a nucleic acid encoding a polypeptide having at least 90% sequence identity to SEQ ID NO: 2 and/or SEQ ID NO: 4.
[0242] 10. Method according to any one of embodiments 1 to 9 wherein said nucleic acid is operably linked to a constitutive promoter, preferably to a medium strength constitutive promoter, preferably to a plant promoter, more preferably to a GOS2 promoter, most preferably to a GOS2 promoter from rice.
[0243] 11. Plant, plant part thereof, including seeds, or plant cell, obtainable by a method according to any one of embodiments 1 to 10, wherein said plant, plant part or plant cell comprises a recombinant nucleic acid encoding a DUF642 polypeptide as defined in any of embodiments 1 and 5 to 9.
[0244] 12. Construct comprising:
   [0245] (i) nucleic acid encoding a DUF642 as defined in any of embodiments 1 and 5 to 9;
   [0246] (ii) one or more control sequences capable of driving expression of the nucleic acid sequence of (i); and optionally
   [0247] (iii) a transcription termination sequence.
[0248] 13. Construct according to embodiment 12, wherein one of said control sequences is a constitutive promoter, preferably a medium strength constitutive promoter, preferably to a plant promoter, more preferably a GOS2 promoter, most preferably a GOS2 promoter from rice.
[0249] 14. Use of a construct according to embodiment 12 or 13 in a method for making plants having enhanced yield-related traits, preferably increased yield relative to control plants, and more preferably increased seed yield and/or increased biomass relative to control plants.
[0250] 15. Plant, plant part or plant cell transformed with a construct according to embodiment 12 or 13.
[0251] 16. Method for the production of a transgenic plant having enhanced yield-related traits relative to control plants, preferably increased yield relative to control plants, and more preferably increased seed yield and/or increased biomass relative to control plants, comprising:
   [0252] (i) introducing and expressing in a plant cell or plant a nucleic acid encoding a DUF642 polypeptide as defined in any of embodiments 1 and 5 to 9; and
   [0253] (ii) cultivating said plant cell or plant under conditions promoting plant growth and development.
[0254] 17. Transgenic plant having enhanced yield-related traits relative to control plants, preferably increased yield relative to control plants, and more preferably increased seed yield and/or increased biomass, resulting from modulated expression of a nucleic acid encoding a DUF642 polypeptide as defined in any of embodiments 1 and 5 to 9 or a transgenic plant cell derived from said transgenic plant.
[0255] 18. Transgenic plant according to embodiment 11, 15 or 17, or a transgenic plant cell derived therefrom, wherein said plant is a crop plant, such as beet, sugarbeet or alfalfa; or a monocotyledonous plant such as sugarcane; or a cereal, such as rice, maize, wheat, barley, millet, rye, triticale, sorghum, emmer, spelt, einkorn, teff, milo or oats.
[0256] 19. Harvestable parts of a plant according to embodiment 18, wherein said harvestable parts are preferably shoot biomass and/or seeds.
[0257] 20. Products derived from a plant according to embodiment 18 and/or from harvestable parts of a plant according to embodiment 19.
[0258] 21. Use of a nucleic acid encoding a DUF642 polypeptide as defined in any of embodiments 1 and 5 to 9 for enhancing yield-related traits in plants relative to control plants, preferably for increasing yield, and more preferably for increasing seed yield and/or for increasing biomass in plants relative to control plants.
[0259] 22. Plant having increased yield, particularly increased biomass and/or increased seed yield, relative to control plants, resulting from modulated expression of a nucleic acid encoding a DUF642 polypeptide, or a transgenic plant cell originating from or being part of said transgenic plant.
[0260] 23. A method for the production of a product comprising the steps of growing the plants of the invention and producing said product from or by
   [0261] a. the plants of the invention; or
   [0262] b. parts, including seeds, of these plants.
[0263] 24. Plant according to embodiment 11, 15, or 21, or a transgenic plant cell originating thereof, or a method according to embodiment 22, wherein said plant is a crop plant, preferably a dicot such as sugar beet, alfalfa, trefoil, chicory, carrot, cassava, cotton, soybean, canola or a monocot, such as sugarcane, or a cereal, such as rice, maize, wheat, barley, millet, rye, triticale, sorghum emmer, spelt, secale, einkorn, teff, milo and oats.
[0264] 25. Construct according to embodiment 12 or 13 comprised in a plant cell.
[0265] 26. Recombinant chromosomal DNA comprising the construct according to embodiment 12 or 13.

[0266] Moreover concerning epimerase-related like polypeptides, the present invention relates to the following specific items:
[0267] 1. A method for enhancing yield-related traits in plants relative to control plants, comprising modulating expression in a plant of a nucleic acid encoding an epimerase-related like polypeptide, wherein said epimerase-related like polypeptide comprises one or more of the following motifs:

| (SEQ ID NO: 273) | | |
|---|---|---|
| (i) | Motif 7: | CREEGV[DE][QK]VFVD[AG]AH[AS]IG[QSC]V[PDE][VI][DN][VM][KR] |
| | | [ED]IGADFY[TV]SNLHKWFFCPP[SA]VAFL[YH], |
| (SEQ ID NO: 274) | | |
| (ii) | Motif 8: | EF[SA]HH[DN]P[GAN]VAR[IV]NNGSFG[CS]CP[AG]S[VI][LI]AAQ[ARK] |
| | | [RN] WQ[LR][LRQ]FL[RQA]QPD[AD]FYF[ND]xL[QRK][PK]G, |
| (SEQ ID NO: 275) | | |
| (iii) | Motif 9: | S[LI]VDNATTAAAIVLQ[HQ][VAI][AG][WR][AS]FAEG[RKN]FA[KR][GN] |
| | | D[AVT]V[LV]MLH[YC]AY[GQ][AS]VKKSI[EQH]AYV |

[0268] 2. Method according to item 1, wherein said modulated expression is effected by introducing and expressing in a plant said nucleic acid encoding said epimerase-related like polypeptide.
[0269] 3. Method according to item 1 or 2, wherein said enhanced yield-related traits comprise increased yield relative to control plants, and preferably comprise increased biomass and/or increased seed yield relative to control plants.
[0270] 4. Method according to any of items 1 to 3, wherein said epimerase-related like polypeptide as used herein comprises a conserved domain with at least 50% sequence identity to a conserved domain as represented by any one of:
   [0271] amino acid coordinates 32 to 449 in SEQ ID NO:198 (motif 10);
   [0272] amino acid coordinates 47 to 276 in SEQ ID NO:198 (motif 11);
   [0273] amino acid coordinates 92 to 364 in SEQ ID NO:198 (motif 12); and
   [0274] amino acid coordinates 59 to 323 in SEQ ID NO:198 (motif 13).
[0275] 5. Method according to any of items 1 or 4, wherein said nucleic acid encodes a polypeptide having at least 40% overall sequence identity to the amino acid represented by SEQ ID NO: 198.
[0276] 6. Method according to any of items 1 to 5, wherein said nucleic acid encoding said epimerase-related like polypeptide is of plant origin, preferably from a dicotyledonous plant, further preferably from the family Salicaceae, more preferably from the genus Populus, most preferably from Populus trichocarpa.
[0277] 7. Method according to any one of items 1 to 6, wherein said nucleic acid encoding said epimerase-related like polypeptide encodes any one of the polypeptides listed in Table A2 or is a portion of such a nucleic acid, or a nucleic acid capable of hybridising with such a nucleic acid.
[0278] 8. Method according to any one of items 1 to 7, wherein said nucleic acid sequence encodes an orthologue or paralogue of any of the polypeptides given in Table A2.
[0279] 9. Method according to any one of items 1 to 8, wherein said enhanced yield-related traits are obtained under non-stress conditions.
[0280] 10. Method according to any one of items 1 to 8, wherein said enhanced yield-related traits are obtained under conditions of drought stress, salt stress or nitrogen deficiency.
[0281] 11. Method according to any one of items 1 to 10, wherein said nucleic acid is operably linked to a constitutive promoter, preferably to a medium strength constitutive promoter, preferably to a plant promoter, more preferably to a GOS2 promoter, most preferably to a GOS2 promoter from rice.
[0282] 12. Plant, plant part thereof, including seeds, or plant cell, obtainable by a method according to any one of items 1 to 11, wherein said plant, plant part or plant cell comprises a recombinant nucleic acid encoding an epimerase-related like polypeptide as defined in any of items 1 and 4 to 8.
[0283] 13. Plant according to item 12 or a plant cell derived therefrom, wherein said plant is a crop plant, such as beet, sugarbeet or alfalfa; or a monocotyledonous plant such as sugarcane; or a cereal, such as rice, maize, wheat, barley, millet, rye, triticale, sorghum, emmer, spelt, secale, einkorn, teff, milo or oats.
[0284] 14. Construct comprising:
   [0285] (i) nucleic acid encoding an epimerase-related like polypeptide as defined in any of items 1 and 4 to 8;
   [0286] (ii) one or more control sequences capable of driving expression of the nucleic acid sequence of (i); and optionally
   [0287] (iii) a transcription termination sequence.
[0288] 15. Construct according to item 14, wherein one of said control sequences is a constitutive promoter, preferably a medium strength constitutive promoter, preferably to a plant promoter, more preferably a GOS2 promoter, most preferably a GOS2 promoter from rice.
[0289] 16. Use of a construct according to item 14 or 15 in a method for making plants having enhanced yield-related traits, preferably increased yield relative to control plants, and more preferably increased seed yield and/or increased biomass relative to control plants.
[0290] 17. Plant, plant part or plant cell transformed with a construct according to item 14 or 15.
[0291] 18. Plant according to item 17 or a plant cell derived therefrom, wherein said plant is a crop plant, such as beet, sugarbeet or alfalfa; or a monocotyledonous plant such as sugarcane; or a cereal, such as rice, maize, wheat, barley, millet, rye, triticale, sorghum, emmer, spelt, secale, einkorn, teff, milo or oats.
[0292] 19. Method for the production of a transgenic plant having enhanced yield-related traits relative to control plants, preferably increased yield relative to control plants, and more preferably increased seed yield and/or increased biomass relative to control plants, comprising:
   [0293] (i) introducing and expressing in a plant cell or plant a nucleic acid encoding an epimerase-related like polypeptide as defined in any of items 1 and 4 to 8; and
   [0294] (ii) cultivating said plant cell or plant under conditions promoting plant growth and development.
[0295] 20. Transgenic plant having enhanced yield-related traits relative to control plants, preferably increased yield relative to control plants, and more preferably increased seed yield and/or increased biomass, resulting from modulated expression of a nucleic acid encoding an epimerase-related like polypeptide as defined in any of items 1 and 4 to 8; or a transgenic plant cell derived from said transgenic plant.
[0296] 21. Transgenic plant according to item 20 or a transgenic plant cell derived therefrom, wherein said plant is a crop plant, such as beet, sugarbeet or alfalfa; or a monocotyledonous plant such as sugarcane; or a cereal, such as rice, maize, wheat, barley, millet, rye, triticale, sorghum, emmer, spelt, secale, einkorn, teff, milo or oats.
[0297] 22. Harvestable parts of a plant according to any of items 12-13, 17-18 or 20-21, wherein said harvestable parts are preferably shoot biomass and/or seeds.
[0298] 23. Products derived from a plant according to any of items 12-13, 17-18 or 20-21 and/or from harvestable parts of a plant according to item 22.
[0299] 24. Isolated nucleic acid molecule selected from:
   [0300] (i) a nucleic acid represented by SEQ ID NO: 199;
   [0301] (ii) the complement of a nucleic acid represented by SEQ ID NO: 199;
   [0302] (iii) a nucleic acid encoding epimerase-related like polypeptide having in increasing order of preference at least 50%, 51%, 52%, 53%, 54%, 55%, 56%, 57%, 58%, 59%, 60%, 61%, 62%, 63%, 64%, 65%, 66%, 67%, 68%, 69%, 70%, 71%, 72%, 73%, 74%, 75%, 76%, 77%, 78%, 79%, 80%, 81%, 82%, 83%, 84%, 85%, 86%, 87%, 88%, 89%, 90%, 91%, 92%, 93%, 94%, 95%, 96%, 97%, 98%, or 99% sequence identity to the amino acid sequence represented by SEQ ID NO: 200, and additionally or alternatively comprising one or more motifs having in increasing order of preference at least 50%, 55%, 60%, 65%, 70%, 75%, 80%, 85%, 90%, 95%, 96%, 97%, 98%, 99% or more sequence identity to any one or more of the motifs 7 to 13, and further preferably conferring enhanced yield-related traits relative to control plants.
   [0303] (iv) a nucleic acid molecule which hybridizes with a nucleic acid molecule of (i) to (iii) under high stringency hybridization conditions and preferably confers enhanced yield-related traits relative to control plants.
[0304] 25. Isolated polypeptide selected from:
   [0305] (i) an amino acid sequence represented by SEQ ID NO: 200;
   [0306] (ii) an amino acid sequence having, in increasing order of preference, at least 50%, 51%, 52%, 53%, 54%, 55%, 56%, 57%, 58%, 59%, 60%, 61%, 62%, 63%, 64%, 65%, 66%, 67%, 68%, 69%, 70%, 71%, 72%, 73%, 74%, 75%, 76%, 77%, 78%, 79%, 80%, 81%, 82%, 83%, 84%, 85%, 86%, 87%, 88%, 89%, 90%, 91%, 92%, 93%, 94%, 95%, 96%, 97%, 98%, or 99% sequence identity to the amino acid sequence represented by SEQ ID NO: 200, and additionally or alternatively comprising one or more motifs having in increasing order of preference at least 50%, 55%, 60%, 65%, 70%, 75%, 80%, 85%, 90%, 95%, 96%, 97%, 98%, 99% or more sequence identity to any one or more of the motifs 7 to 13, and further preferably conferring enhanced yield-related traits relative to control plants;
   [0307] (iii) derivatives of any of the amino acid sequences given in (i) or (ii) above.
[0308] 26. Use of a nucleic acid encoding an epimerase-related like polypeptide as defined in any of items 1 and 4 to 8 and 25; for enhancing yield-related traits in plants relative to control plants, preferably for increasing yield, and more preferably for increasing seed yield and/or for increasing biomass in plants relative to control plants.
[0309] 27. Use of a nucleic acid as defined in item 24 and encoding an epimerase-related like polypeptide for enhancing yield-related traits in plants relative to control plants, preferably for increasing yield, and more preferably for increasing seed yield in plants relative to control plants.
[0310] 28. Use of a nucleic acid encoding an epimerase-related like polypeptide as defined in any of items 1 and 4 to 8 and 25; as molecular marker.
[0311] 29. Use of a nucleic acid as defined in item 24 and encoding an epimerase-related like polypeptide as defined in any of items 1 and 4 to 8 and 25 as molecular marker.
[0312] 30. A method for the production of a product comprising the steps of growing the plants according to item 12, 18 or 20 and producing said product from or by
   [0313] (i) said plants; or
   [0314] (ii) parts, including seeds, of said plants.
[0315] 31. Construct according to item 14 or 15 comprised in a plant cell.
[0316] 32. Recombinant chromosomal DNA comprising the construct according to item 14 or 15 comprised.

[0317] Moreover concerning epimerase-related like polypeptides, the invention is in particular characterized by any one or more of the following embodiments:
[0318] I. A method for enhancing yield-related traits in plants relative to control plants, comprising modulating expression in a plant of a nucleic acid encoding an epimerase-related like polypeptide by introducing and expressing in a plant said nucleic acid encoding said epimerase-related like polypeptide, wherein said epimerase-related like polypeptide has at least 80% overall sequence identity to the amino acid represented by SEQ ID NO: 198.
[0319] II. Method according to embodiment I, wherein said epimerase-related like polypeptide comprises one or more of the following motifs:

| (SEQ ID NO: 273) | | |
|---|---|---|
| (i) | Motif 7: | CREEGV[DE][QK]VFVD[AG]AH[AS]IG[QSC]V[PDE][VI][DN][VM][KR] |
| | | [ED]IGADFY[TV]SNLHKWFFCPP[SA]VAFL[YH], |
| (SEQ ID NO: 274) | | |
| (ii) | Motif 8: | EF[SA]HH[DN]P[GAN]VAR[IV]NNGSFG[CS]CP[AG]S[VI][LI]AAQ[ARK] |
| | | [RN]WQ[LR][LRQ]FL[RQA]QPD[AD]FYF[ND]xL[QRK][PK]G, |
| (SEQ ID NO: 275) | | |
| (iii) | Motif 9: | S[LI]VDNATTAAAIVLQ[HQ][VAI][AG][WR][AS]FAEG[RKN]FA[KR][GN] |
| | | D[AVT]V[LV]MLH[YC]AY[GQ][AS]VKKSI[EQH]AYV |

[0320] III. Method according to embodiment I or II, wherein said enhanced yield-related traits comprises increased biomass.
[0321] IV. Method according to any one of embodiments I to III, wherein said enhanced yield-related traits comprises increased seed yield relative to control plants.
[0322] V. Method according to any of embodiments I to IV, wherein said epimerase-related like polypeptide as used herein comprises at least two conserved domains selected from the group comprising PyrdxIP-dep_Trfase_major (SSF53383), PTHR11601, Aminotran_{—}5 (PF00266) and PyrdxIP-dep_Trfase_major_sub1 (G3DSA:3.40.640.10), and preferably comprises i) an Aminotran_{—}5 conserved domain and ii) at least one other conserved domain selected from the group comprising PyrdxIP-dep_Trfase_major (SSF53383), PTHR11601, and PyrdxIP-dep_Trfase_major_sub1 (G3DSA:3.40.640.10),
[0323] VI. Method according to any of embodiments I to IV, wherein said epimerase-related like polypeptide comprises a conserved domain with at least 50% sequence identity to a conserved domain as represented by any one of:
   [0324] amino acid coordinates 32 to 449 in SEQ ID NO:198 (motif 10);
   [0325] amino acid coordinates 47 to 276 in SEQ ID NO:198 (motif 11);
   [0326] amino acid coordinates 92 to 364 in SEQ ID NO:198 (motif 12); and
   [0327] amino acid coordinates 59 to 323 in SEQ ID NO:198 (motif 13).
[0328] VII. Method according to any of embodiments I to VI, wherein said nucleic acid encoding said epimerase-related like polypeptide is of plant origin, preferably from a dicotyledonous plant, further preferably from the family Salicaceae, more preferably from the genus Populus, most preferably from Populus trichocarpa.
[0329] VIII. Method according to any one of embodiments I to VII, wherein said nucleic acid encoding said epimerase-related like polypeptide encodes any one of the polypeptides listed in Table A2 or is a portion of such a nucleic acid, or a nucleic acid capable of hybridising with such a nucleic acid.
[0330] IX. Method according to any one of embodiments I to VIII, wherein said nucleic acid sequence encodes an orthologue or paralogue of any of the polypeptides given in Table A2.
[0331] X. Method according to any one of embodiments I to IX, wherein said nucleic acid is operably linked to a GOS2 promoter, preferably to a GOS2 promoter from rice.
[0332] XI. Construct comprising:
   [0333] (i) nucleic acid encoding an epimerase-related like polypeptide as defined in any of embodiments I and V to IX;
   [0334] (ii) one or more control sequences capable of driving expression of the nucleic acid sequence of (i), and preferably a constitutive promoter, preferably to a medium strength constitutive promoter, preferably to a plant promoter, more preferably to a GOS2 promoter, most preferably to a GOS2 promoter from rice, and optionally
   [0335] (iii) a transcription termination sequence.
[0336] XII. Plant, plant part or plant cell transformed with a construct according to embodiment XI.
[0337] XIII. Method for the production of a transgenic plant having enhanced yield-related traits relative to control plants, preferably increased yield relative to control plants, and more preferably increased seed yield and/or increased biomass relative to control plants, comprising:
   [0338] (i) introducing and expressing in a plant cell or plant a nucleic acid encoding an epimerase-related like polypeptide as defined in any of embodiments I and V to IX; and
   [0339] (ii) cultivating said plant cell or plant under conditions promoting plant growth and development.
[0340] XIV. Transgenic plant having enhanced yield-related traits relative to control plants, preferably increased yield relative to control plants, and more preferably increased seed yield and/or increased biomass, resulting from the introduction and expression therein of a nucleic acid encoding an epimerase-related like polypeptide as defined in any of embodiments I and V to IX; or a transgenic plant cell derived from said transgenic plant.
[0341] XV. Use of a nucleic acid encoding an epimerase-related like polypeptide as defined in any of embodiments I and V to IX; for enhancing yield-related traits in plants relative to control plants, preferably for increasing yield, and more preferably for increasing seed yield and/or for increasing biomass in plants relative to control plants.

[0342] Moreover concerning PLPCase polypeptides, the present invention relates to the following specific embodiments:
[0343] 1. A method for enhancing yield-related traits in plants relative to control plants, comprising modulating expression in a plant of a nucleic acid encoding a Phospholipase/carboxylesterase (PLPCase) polypeptide, wherein said PLPCase polypeptide comprises an InterPro accession IPR003140 corresponding to PFAM accession number PF022030 Phospholipase/carboxylesterase (PLPCase) domain.
[0344] 2. Method according to embodiment 1, wherein said modulated expression is effected by introducing and expressing in a plant said nucleic acid encoding said PLPCase polypeptide.
[0345] 3. Method according to embodiments 1 or 2, wherein said enhanced yield-related traits comprise increased yield relative to control plants, and preferably comprise increased root biomass and/or increased seed yield relative to control plants.
[0346] 4. Method according to any one of embodiments 1 to 3, wherein said enhanced yield-related traits are obtained under non-stress conditions.
[0347] 5. Method according to any one of embodiments 1 to 3, wherein said enhanced yield-related traits are obtained under conditions of drought stress, salt stress or nitrogen deficiency.
[0348] 6. Method according to any of embodiments 1 to 5, wherein said PLPCase polypeptide comprises one or more of the following motifs:

| (SEQ ID NO: 348) | | |
|---|---|---|
| (i) | Motif 14: | E[FY]G[KR]T[HY]VVRPKG[KR]HQATIVWLHGLGDNG[LSA]S[SW]SQLL |
| | | [ED][ST]LPLPNIKWICPTA, |
| (SEQ ID NO: 349) | | |
| (ii) | Motif 15: | PDD[WIVL]EGLDASAAH[IV]ANLLS[TS]EP[AS]D[VI]K[VL]G[IV]G, |
| (SEQ ID NO: 350) | | |
| (iii) | Motif 16: | FSMGAA[IT]ALYSA[TA]C[YF]A[MHL] |

[0349] 7. Method according to any one of embodiments 1 to 6, wherein said nucleic acid encoding a PLPCase is of plant origin, preferably from a dicotyledonous plant, further preferably from the family Fabaceae, more preferably from the genus Medicago, most preferably from Medicago truncatula.
[0350] 8. Method according to any one of embodiments 1 to 7, wherein said nucleic acid encoding a PLPCase encodes any one of the polypeptides listed in Table A3 or is a portion of such a nucleic acid, or a nucleic acid capable of hybridising with such a nucleic acid.
[0351] 9. Method according to any one of embodiments 1 to 8, wherein said nucleic acid sequence encodes an orthologue or paralogue of any of the polypeptides given in Table A3.
[0352] 10. Method according to any one of embodiments 1 to 9, wherein said nucleic acid encodes the polypeptide represented by SEQ ID NO: 285.
[0353] 11. Method according to any one of embodiments 1 to 10, wherein said nucleic acid is operably linked to a constitutive promoter, preferably to a medium strength constitutive promoter, preferably to a plant promoter, more preferably to a GOS2 promoter, most preferably to a GOS2 promoter from rice.
[0354] 12. Plant, plant part thereof, including seeds, or plant cell, obtainable by a method according to any one of embodiments 1 to 11, wherein said plant, plant part or plant cell comprises a recombinant nucleic acid encoding a PLPCase polypeptide as defined in any of embodiments 1 and 6 to 10.
[0355] 13. Construct comprising:
   [0356] (i) nucleic acid encoding a PLPCase as defined in any of embodiments 1 and 6 to 10;
   [0357] (ii) one or more control sequences capable of driving expression of the nucleic acid sequence of (i); and optionally
   [0358] (iii) a transcription termination sequence.
[0359] 14. Construct according to embodiment 13, wherein one of said control sequences is a constitutive promoter, preferably a medium strength constitutive promoter, preferably to a plant promoter, more preferably a GOS2 promoter, most preferably a GOS2 promoter from rice.
[0360] 15. Use of a construct according to embodiment 13 or 14 in a method for making plants having enhanced yield-related traits, preferably increased yield relative to control plants, and more preferably increased root biomass, increased greenness index and/or increased seed yield relative to control plants.
[0361] 16. Plant, plant part or plant cell transformed with a construct according to embodiment 13 or 14.
[0362] 17. Method for the production of a transgenic plant having enhanced yield-related traits relative to control plants, preferably increased yield relative to control plants, and more preferably increased root biomass, increased greenness index and/or increased seed yield relative to control plants, comprising:
   [0363] (i) introducing and expressing in a plant cell or plant a nucleic acid encoding a PLPCase polypeptide as defined in any of embodiments 1 and 6 to 10; and
   [0364] (ii) cultivating said plant cell or plant under conditions promoting plant growth and development.
[0365] 18. Transgenic plant having enhanced yield-related traits relative to control plants, preferably increased yield relative to control plants, and more preferably increased seed yield and/or increased biomass, resulting from modulated expression of a nucleic acid encoding a PLPCase polypeptide as defined in any of embodiments 1 and 6 to 10 or a transgenic plant cell derived from said transgenic plant.
[0366] 19. Transgenic plant according to embodiment 12, 16 or 18, or a transgenic plant cell derived therefrom, wherein said plant is a crop plant, such as beet, sugarbeet or alfalfa; or a monocotyledonous plant such as sugarcane; or a cereal, such as rice, maize, wheat, barley, millet, rye, triticale, sorghum, emmer, spelt, secale, einkorn, teff, milo or oats.
[0367] 20. Harvestable parts of a plant according to embodiment 18 or 19, wherein said harvestable parts are preferably root biomass and/or seeds.
[0368] 21. Products derived from a plant according to embodiment 18 or 19 and/or from harvestable parts of a plant according to embodiment 20.
[0369] 22. Use of a nucleic acid encoding a PLPCase polypeptide as defined in any of embodiments 1 and 6 to 10 for enhancing yield-related traits in plants relative to control plants, preferably for increasing yield, and more preferably for root biomass, increased greenness index and/or increased seed yield in plants relative to control plants.
[0370] 23. A method for the production of a product comprising the steps of growing the plants according to embodiment 16, 18 or 19 and producing said product from or by
   [0371] (i) said plants; or
   [0372] (ii) parts, including seeds, of said plants.
[0373] 24. Construct according to embodiment 13 or 14 comprised in a plant cell.

[0374] The present invention also relates to the following embodiments:
[0375] 1. A method for enhancing yield-related traits in plants relative to control plants, comprising introducing and expressing in a plant of a nucleic acid encoding a DUF642 polypeptide, wherein said DUF642 polypeptide comprises the signature sequence FSAARTCAQ (SEQ ID NO: 194).
[0376] 2. Method according to embodiment 1, wherein said nucleic acid encodes the polypeptide represented by SEQ ID NO: 2 or SEQ ID NO: 4 or a nucleic acid encoding a polypeptide having at least 90% sequence identity to SEQ ID NO: 2 and/or SEQ ID NO: 4.
[0377] 3. Method according to any one of embodiments 1 to 9, wherein said nucleic acid is operably linked to a constitutive promoter, preferably to a medium strength constitutive promoter, preferably to a plant promoter, more preferably to a GOS2 promoter, most preferably to a GOS2 promoter from rice.
[0378] 4. Plant, plant part thereof, including seeds, or plant cell, obtainable by a method according to any one of embodiments 1 to 3, wherein said plant, plant part or plant cell comprises a recombinant nucleic acid encoding a DUF642 polypeptide as defined in any of embodiments 1 to 3.
[0379] 5. Construct comprising:
   [0380] (i) nucleic acid encoding a DUF642 as defined in any of embodiments 1 to 3;
   [0381] (ii) one or more control sequences capable of driving expression of the nucleic acid sequence of (i); and optionally
   [0382] (iii) a transcription termination sequence.
[0383] 6. Construct according to embodiment 5, wherein one of said control sequences is a constitutive promoter, preferably a medium strength constitutive promoter, preferably to a plant promoter, more preferably a GOS2 promoter, most preferably a GOS2 promoter from rice.
[0384] 7. Use of a construct according to embodiment 5 or 6 in a method for making plants having enhanced yield-related traits, preferably increased yield relative to control plants, and more preferably increased seed yield and/or increased biomass relative to control plants.
[0385] 8. Plant, plant part or plant cell transformed with a construct according to embodiment 5 or 6.
[0386] 9. Method for the production of a transgenic plant having enhanced yield-related traits relative to control plants, preferably increased yield relative to control plants, and more preferably increased seed yield and/or increased biomass relative to control plants, comprising:
   [0387] (i) introducing and expressing in a plant cell or plant a nucleic acid encoding a DUF642 polypeptide as defined in any of embodiments 1 to 3; and
   [0388] (ii) cultivating said plant cell or plant under conditions promoting plant growth and development.
[0389] 10. Transgenic plant having enhanced yield-related traits relative to control plants, preferably increased yield relative to control plants, and more preferably increased seed yield and/or increased biomass, resulting from modulated expression of a nucleic acid encoding a DUF642 polypeptide as defined in any of embodiments 1 to 3 or a transgenic plant cell derived from said transgenic plant.
[0390] 11. Transgenic plant according to embodiment 4, 8 or 10, or a transgenic plant cell derived therefrom, wherein said plant is a crop plant, such as beet, sugarbeet or alfalfa; or a monocotyledonous plant such as sugarcane; or a cereal, such as rice, maize, wheat, barley, millet, rye, triticale, sorghum, emmer, spelt, einkorn, teff, milo or oats.
[0391] 12. Harvestable parts of a plant according to embodiment 11, wherein said harvestable parts are preferably shoot biomass and/or seeds.
[0392] 13. Products derived from a plant according to embodiment 11 and/or from harvestable parts of a plant according to embodiment 12.
[0393] 14. Use of a nucleic acid encoding a DUF642 polypeptide as defined in any of embodiments 1 to 3 for enhancing yield-related traits in plants relative to control plants, preferably for increasing yield, and more preferably for increasing seed yield and/or for increasing biomass in plants relative to control plants.
[0394] 15. A method for enhancing yield-related traits in plants relative to control plants, comprising modulating expression in a plant of a nucleic acid encoding an epimerase-related like polypeptide by introducing and expressing in a plant said nucleic acid encoding said epimerase-related like polypeptide, wherein said epimerase-related like polypeptide has at least 80% overall sequence identity to the amino acid represented by SEQ ID NO: 198.
[0395] 16. Method according to embodiment 15, wherein said epimerase-related like polypeptide comprises one or more of the following motifs:

| (SEQ ID NO: 273) | | |
|---|---|---|
| (i) | Motif 7: | CREEGV[DE][QK]VFVD[AG]AH[AS]IG[QSC]V[PDE][VI][DN][VM][KR] |
| | | [ED]IGADFY[TV]SNLHKWFFCPP[SA]VAFL[YH], |
| (SEQ ID NO: 274) | | |
| (ii) | Motif 8: | EF[SA]HH[DN]P[GAN]VAR[IV]NNGSFG[CS]CP[AG]S[VI][LI]AAQ[ARK] |
| | | [RN]WQ[LR][LRQ]FL[RQA]QPD[AD]FYF[ND]xL[QRK][PK]G, |
| (SEQ ID NO: 275) | | |
| (iii) | Motif 9: | S[LI]VDNATTAAAIVLQ[HQ][VAI][AG][WR][AS]FAEG[RKN]FA[KR][GN] |
| | | D[AVT]V[LV]MLH[YC]AY[GQ][AS]VKKSI[EQH]AYV |

[0396] 17. Method according to embodiment 15 or 16, wherein said enhanced yield-related traits comprises increased biomass.
[0397] 18. Method according to any one of embodiments 15 to 17, wherein said enhanced yield-related traits comprises increased seed yield relative to control plants.
[0398] 19. Method according to any of embodiments 15 to 18, wherein said epimerase-related like polypeptide as used herein comprises at least two conserved domains selected from the group comprising PyrdxIP-dep_Trfase_major (SSF53383), PTHR11601, Aminotran_{—}5 (PF00266) and PyrdxIP-dep_Trfase_major_sub1 (G3DSA:3.40.640.10), and preferably comprises an Aminotran_{—}5 conserved domain and at least one other conserved domains selected from the group comprising PyrdxIP-dep_Trfase_major (SSF53383), PTHR11601, and PyrdxIP-dep_Trfase_major_sub1 (G3DSA:3.40.640.10),
[0399] 20. Method according to any of embodiments 15 to 18, wherein said epimerase-related like polypeptide comprises a conserved domain with at least 50% sequence identity to a conserved domain as represented by any one of:
   [0400] amino acid coordinates 32 to 449 in SEQ ID NO:198 (motif 10);
   [0401] amino acid coordinates 47 to 276 in SEQ ID NO: 198 (motif 11);
   [0402] amino acid coordinates 92 to 364 in SEQ ID NO: 198 (motif 12); and
   [0403] amino acid coordinates 59 to 323 in SEQ ID NO: 198 (motif 13).
[0404] 21. Method according to any of embodiments 15 to 20, wherein said nucleic acid encoding said epimerase-related like polypeptide is of plant origin, preferably from a dicotyledonous plant, further preferably from the family Salicaceae, more preferably from the genus Populus, most preferably from Populus trichocarpa.
[0405] 22. Method according to any one of embodiments 15 to 21, wherein said nucleic acid encoding said epimerase-related like polypeptide encodes any one of the polypeptides listed in Table A or is a portion of such a nucleic acid, or a nucleic acid capable of hybridising with such a nucleic acid.
[0406] 23. Method according to any one of embodiments 15 to 22, wherein said nucleic acid sequence encodes an orthologue or paralogue of any of the polypeptides given in Table A2.
[0407] 24. Method according to any one of embodiments 15 to 23, wherein said nucleic acid is operably linked to a GOS2 promoter, preferably to a GOS2 promoter from rice.
[0408] 25. Construct comprising:
   [0409] (i) nucleic acid encoding an epimerase-related like polypeptide as defined in any of embodiments 15 and 19 to 23;
   [0410] (ii) one or more control sequences capable of driving expression of the nucleic acid sequence of (i), and preferably a constitutive promoter, preferably to a medium strength constitutive promoter, preferably to a plant promoter, more preferably to a GOS2 promoter, most preferably to a GOS2 promoter from rice, and optionally
   [0411] (iii) a transcription termination sequence.
[0412] 26. Plant, plant part or plant cell transformed with a construct according to embodiment 25.
[0413] 27. Method for the production of a transgenic plant having enhanced yield-related traits relative to control plants, preferably increased yield relative to control plants, and more preferably increased seed yield and/or increased biomass relative to control plants, comprising:
   [0414] (i) introducing and expressing in a plant cell or plant a nucleic acid encoding an epimerase-related like polypeptide as defined in any of embodiments 15 and 19 to 23; and
   [0415] (ii) cultivating said plant cell or plant under conditions promoting plant growth and development.
[0416] 28. Transgenic plant having enhanced yield-related traits relative to control plants, preferably increased yield relative to control plants, and more preferably increased seed yield and/or increased biomass, resulting from the introduction and expression therein of a nucleic acid encoding an epimerase-related like polypeptide as defined in any of embodiments 15 and 19 to 23; or a transgenic plant cell derived from said transgenic plant.
[0417] 29. Use of a nucleic acid encoding an epimerase-related like polypeptide as defined in any of embodiments 15 and 19 to 23; for enhancing yield-related traits in plants relative to control plants, preferably for increasing yield, and more preferably for increasing seed yield and/or for increasing biomass in plants relative to control plants.
[0418] 30. A method for enhancing yield-related traits in plants relative to control plants, comprising introducing and expressing in a plant of a nucleic acid encoding SEQ ID NO: 285 or homologues having 80% sequence identity to SEQ ID NO: 285.
[0419] 31. Method according to embodiment 30, wherein said enhanced yield-related traits comprise increased yield relative to control plants, and preferably comprise increased root biomass and/or increased seed yield relative to control plants.
[0420] 32. Method according to any one of embodiments 30 to 31, wherein said enhanced yield-related traits are obtained under non-stress conditions.
[0421] 33. Method according to any one of embodiments 30 to 31, wherein said enhanced yield-related traits are obtained under conditions of drought stress, salt stress or nitrogen deficiency.
[0422] 34. Method according to any one of embodiments 30 to 33, wherein said nucleic acid encoding a PLPCase is of plant origin, preferably from a dicotyledonous plant, further preferably from the family Fabaceae, more preferably from the genus Medicago, most preferably from Medicago truncatula.
[0423] 35. Method according to any one of embodiments 30 to 34, wherein said nucleic acid encoding a PLPCase encodes any one of the polypeptides listed in Table A3 or is a portion of such a nucleic acid, or a nucleic acid capable of hybridising with such a nucleic acid, provided said nucleic acid has 80% sequence identity to SEQ ID NO: 285.
[0424] 36. Method according to any one of embodiments 30 to 35, wherein said nucleic acid is operably linked to a constitutive promoter, preferably to a medium strength constitutive promoter, preferably to a plant promoter, more preferably to a GOS2 promoter, most preferably to a GOS2 promoter from rice.
[0425] 37. Plant, plant part thereof, including seeds, or plant cell, obtainable by a method according to any one of embodiments 30 to 36, wherein said plant, plant part or plant cell comprises a recombinant nucleic acid encoding a PLPCase polypeptide as defined in any of embodiments 30 and 35 to 39.
[0426] 38. Construct comprising:
   [0427] (i) nucleic acid encoding a PLPCase as defined in any of embodiments 30 and 34 to 36;
   [0428] (ii) one or more control sequences capable of driving expression of the nucleic acid sequence of (i); and optionally
   [0429] (iii) a transcription termination sequence.
[0430] 39. Construct according to embodiment 38, wherein one of said control sequences is a constitutive promoter, preferably a medium strength constitutive promoter, preferably to a plant promoter, more preferably a GOS2 promoter, most preferably a GOS2 promoter from rice.
[0431] 40. Use of a construct according to embodiment 38 or 39 in a method for making plants having enhanced yield-related traits, preferably increased yield relative to control plants, and more preferably increased root biomass, increased greenness index and/or increased seed yield relative to control plants.
[0432] 41. Plant, plant part or plant cell transformed with a construct according to embodiment 38 or 39.
[0433] 42. Method for the production of a transgenic plant having enhanced yield-related traits relative to control plants, preferably increased yield relative to control plants, and more preferably increased root biomass, increased greenness index and/or increased seed yield relative to control plants, comprising:
   [0434] a. introducing and expressing in a plant cell or plant a nucleic acid encoding a PLPCase polypeptide as defined in any of embodiments 30 and 34 to 36; and
   [0435] b. cultivating said plant cell or plant under conditions promoting plant growth and development.
[0436] 43. Transgenic plant having enhanced yield-related traits relative to control plants, preferably increased yield relative to control plants, and more preferably increased seed yield and/or increased biomass, resulting from modulated expression of a nucleic acid encoding a PLPCase polypeptide as defined in any of embodiments 30 and 34 to 36 or a transgenic plant cell derived from said transgenic plant.
[0437] 44. Transgenic plant according to embodiment 37, 41 or 43, or a transgenic plant cell derived therefrom, wherein said plant is a crop plant, such as beet, sugarbeet or alfalfa; or a monocotyledonous plant such as sugarcane; or a cereal, such as rice, maize, wheat, barley, millet, rye, triticale, sorghum, emmer, spelt, secale, einkorn, teff, milo or oats.
[0438] 45. Harvestable parts of a plant according to embodiment 43 or 44, wherein said harvestable parts are preferably root biomass and/or seeds.
[0439] 46. Products derived from a plant according to embodiment 43 or 44 and/or from harvestable parts of a plant according to embodiment 45.
[0440] 47. Use of a nucleic acid encoding a PLPCase polypeptide as defined in any of embodiments 30 and 34 to 36 for enhancing yield-related traits in plants relative to control plants, preferably for increasing yield, and more preferably for root biomass, increased greenness index and/or increased seed yield in plants relative to control plants.

### DEFINITIONS

[0441] The following definitions will be used throughout the present application. The section captions and headings in this application are for convenience and reference purpose only and should not affect in any way the meaning or interpretation of this application. The technical terms and expressions used within the scope of this application are generally to be given the meaning commonly applied to them in the pertinent art of plant biology, molecular biology, bioinformatics and plant breeding. All of the following term definitions apply to the complete content of this application. The term “essentially”, “about”, “approximately” and the like in connection with an attribute or a value, particularly also define exactly the attribute or exactly the value, respectively. The term “about” in the context of a given numeric value or range relates in particular to a value or range that is within 20%, within 10%, or within 5% of the value or range given. As used herein, the term “comprising” also encompasses the term “consisting of”.

### Peptide(s)/Protein(s)

[0442] The terms “peptides”, “oligopeptides”, “polypeptide” and “protein” are used interchangeably herein and refer to amino acids in a polymeric form of any length, linked together by peptide bonds, unless mentioned herein otherwise.

### Polynucleotide(s)/Nucleic Acid(s)/Nucleic Acid Sequence(s)/Nucleotide Sequence(s)

[0443] The terms “polynucleotide(s)”, “nucleic acid sequence(s)”, “nucleotide sequence(s)”, “nucleic acid(s)”, “nucleic acid molecule” are used interchangeably herein and refer to nucleotides, either ribonucleotides or deoxyribonucleotides or a combination of both, in a polymeric unbranched form of any length.

### Homologue(s)

[0444] “Homologues” of a protein encompass peptides, oligopeptides, polypeptides, proteins and enzymes having amino acid substitutions, deletions and/or insertions relative to the unmodified protein in question and having similar biological and functional activity as the unmodified protein from which they are derived.

[0445] Orthologues and paralogues are two different forms of homologues and encompass evolutionary concepts used to describe the ancestral relationships of genes. Paralogues are genes within the same species that have originated through duplication of an ancestral gene; orthologues are genes from different organisms that have originated through speciation, and are also derived from a common ancestral gene.

[0446] A “deletion” refers to removal of one or more amino acids from a protein.

[0447] An “insertion” refers to one or more amino acid residues being introduced into a predetermined site in a protein. Insertions may comprise N-terminal and/or C-terminal fusions as well as intra-sequence insertions of single or multiple amino acids. Generally, insertions within the amino acid sequence will be smaller than N- or C-terminal fusions, of the order of about 1 to 10 residues. Examples of N- or C-terminal fusion proteins or peptides include the binding domain or activation domain of a transcriptional activator as used in the yeast two-hybrid system, phage coat proteins, (histidine)-6-tag, glutathione S-transferase-tag, protein A, maltose-binding protein, dihydrofolate reductase, Tag•100 epitope, c-myc epitope, FLAG®-epitope, lacZ, CMP (calmodulin-binding peptide), HA epitope, protein C epitope and VSV epitope.

[0448] A “substitution” refers to replacement of amino acids of the protein with other amino acids having similar properties (such as similar hydrophobicity, hydrophilicity, antigenicity, propensity to form or break α-helical structures or β-sheet structures). Amino acid substitutions are typically of single residues, but may be clustered depending upon functional constraints placed upon the polypeptide and may range from 1 to 10 amino acids. The amino acid substitutions are preferably conservative amino acid substitutions. Conservative substitution tables are well known in the art (see for example Creighton (1984) Proteins. W.H. Freeman and Company (Eds) and Table 1 below).

TABLE 1
Examples of conserved amino acid substitutions

| | Conservative | | Conservative |
|---|---|---|---|
| Residue | Substitutions | Residue | Substitutions |
| Ala | Ser | Leu | Ile; Val |
| Arg | Lys | Lys | Arg; Gln |
| Asn | Gln; His | Met | Leu; Ile |
| Asp | Glu | Phe | Met; Leu; Tyr |
| Gln | Asn | Ser | Thr; Gly |
| Cys | Ser | Thr | Ser; Val |
| Glu | Asp | Trp | Tyr |
| Gly | Pro | Tyr | Trp; Phe |
| His | Asn; Gln | Val | Ile; Leu |
| Ile | Leu, Val | | |

[0449] Amino acid substitutions, deletions and/or insertions may readily be made using peptide synthetic techniques known in the art, such as solid phase peptide synthesis and the like, or by recombinant DNA manipulation. Methods for the manipulation of DNA sequences to produce substitution, insertion or deletion variants of a protein are well known in the art. For example, techniques for making substitution mutations at predetermined sites in DNA are well known to those skilled in the art and include M13 mutagenesis, T7-Gen in vitro mutagenesis (USB, Cleveland, Ohio), QuickChange Site Directed mutagenesis (Stratagene, San Diego, Calif.), PCR-mediated site-directed mutagenesis or other site-directed mutagenesis protocols (see Current Protocols in Molecular Biology, John Wiley & Sons, N.Y. (1989 and yearly updates)).

### Derivatives

[0450] “Derivatives” include peptides, oligopeptides, polypeptides which may, compared to the amino acid sequence of the naturally-occurring form of the protein, such as the protein of interest, comprise substitutions of amino acids with non-naturally occurring amino acid residues, or additions of non-naturally occurring amino acid residues. “Derivatives” of a protein also encompass peptides, oligopeptides, polypeptides which comprise naturally occurring altered (glycosylated, acylated, prenylated, phosphorylated, myristoylated, sulphated etc.) or non-naturally altered amino acid residues compared to the amino acid sequence of a naturally-occurring form of the polypeptide. A derivative may also comprise one or more non-amino acid substituents or additions compared to the amino acid sequence from which it is derived, for example a reporter molecule or other ligand, covalently or non-covalently bound to the amino acid sequence, such as a reporter molecule which is bound to facilitate its detection, and non-naturally occurring amino acid residues relative to the amino acid sequence of a naturally-occurring protein. Furthermore, “derivatives” also include fusions of the naturally-occurring form of the protein with tagging peptides such as FLAG, HIS6 or thioredoxin (for a review of tagging peptides, see Terpe, Appl. Microbiol. Biotechnol. 60, 523-533, 2003).

### Domain, Motif/Consensus Sequence/Signature

[0451] The term “domain” refers to a set of amino acids conserved at specific positions along an alignment of sequences of evolutionarily related proteins. While amino acids at other positions can vary between homologues, amino acids that are highly conserved at specific positions indicate amino acids that are likely essential in the structure, stability or function of a protein. Identified by their high degree of conservation in aligned sequences of a family of protein homologues, they can be used as identifiers to determine if any polypeptide in question belongs to a previously identified polypeptide family.

[0452] The term “motif” or “consensus sequence” or “signature” refers to a short conserved region in the sequence of evolutionarily related proteins. Motifs are frequently highly conserved parts of domains, but may also include only part of the domain, or be located outside of conserved domain (if all of the amino acids of the motif fall outside of a defined domain).

[0453] Specialist databases exist for the identification of domains, for example, SMART (Schultz et al. (1998) Proc. Natl. Acad. Sci. USA 95, 5857-5864; Letunic et al. (2002) Nucleic Acids Res 30, 242-244), InterPro (Mulder et al., (2003) Nucl. Acids. Res. 31, 315-318), Prosite (Bucher and Bairoch (1994), A generalized profile syntax for biomolecular sequences motifs and its function in automatic sequence interpretation. (In) ISMB-94; Proceedings 2nd International Conference on Intelligent Systems for Molecular Biology. Altman R., Brutlag D., Karp P., Lathrop R., Searls D., Eds., pp 53-61, AAAI Press, Menlo Park; Hulo et al., Nucl. Acids. Res. 32:D134-D137, (2004)), or Pfam (Bateman et al., Nucleic Acids Research 30(1): 276-280 (2002)). A set of tools for in silico analysis of protein sequences is available on the ExPASy proteomics server (Swiss Institute of Bioinformatics (Gasteiger et al., ExPASy: the proteomics server for in-depth protein knowledge and analysis, Nucleic Acids Res. 31:3784-3788 (2003)). Domains or motifs may also be identified using routine techniques, such as by sequence alignment.

[0454] Methods for the alignment of sequences for comparison are well known in the art, such methods include GAP, BESTFIT, BLAST, FASTA and TFASTA. GAP uses the algorithm of Needleman and Wunsch ((1970) J Mol Biol 48: 443-453) to find the global (i.e. spanning the complete sequences) alignment of two sequences that maximizes the number of matches and minimizes the number of gaps. The BLAST algorithm (Altschul et al. (1990) J Mol Biol 215: 403-10) calculates percent sequence identity and performs a statistical analysis of the similarity between the two sequences. The software for performing BLAST analysis is publicly available through the National Centre for Biotechnology Information (NCBI). Homologues may readily be identified using, for example, the ClustalW multiple sequence alignment algorithm (version 1.83), with the default pairwise alignment parameters, and a scoring method in percentage. Global percentages of similarity and identity may also be determined using one of the methods available in the MatGAT software package (Campanella et al., BMC Bioinformatics. 2003 Jul. 10; 4:29. MatGAT: an application that generates similarity/identity matrices using protein or DNA sequences.). Minor manual editing may be performed to optimise alignment between conserved motifs, as would be apparent to a person skilled in the art. Furthermore, instead of using full-length sequences for the identification of homologues, specific domains may also be used. The sequence identity values may be determined over the entire nucleic acid or amino acid sequence or over selected domains or conserved motif(s), using the programs mentioned above using the default parameters. For local alignments, the Smith-Waterman algorithm is particularly useful (Smith T F, Waterman M S (1981) J. Mol. Biol. 147(1); 195-7).

### Reciprocal BLAST

[0455] Typically, this involves a first BLAST involving BLASTing a query sequence (for example using any of the sequences listed in Table A of the Examples section) against any sequence database, such as the publicly available NCBI database. BLASTN or TBLASTX (using standard default values) are generally used when starting from a nucleotide sequence, and BLASTP or TBLASTN (using standard default values) when starting from a protein sequence. The BLAST results may optionally be filtered. The full-length sequences of either the filtered results or non-filtered results are then BLASTed back (second BLAST) against sequences from the organism from which the query sequence is derived. The results of the first and second BLASTs are then compared. A paralogue is identified if a high-ranking hit from the first blast is from the same species as from which the query sequence is derived, a BLAST back then ideally results in the query sequence amongst the highest hits; an orthologue is identified if a high-ranking hit in the first BLAST is not from the same species as from which the query sequence is derived, and preferably results upon BLAST back in the query sequence being among the highest hits.

[0456] High-ranking hits are those having a low E-value. The lower the E-value, the more significant the score (or in other words the lower the chance that the hit was found by chance). Computation of the E-value is well known in the art. In addition to E-values, comparisons are also scored by percentage identity. Percentage identity refers to the number of identical nucleotides (or amino acids) between the two compared nucleic acid (or polypeptide) sequences over a particular length. In the case of large families, ClustalW may be used, followed by a neighbour joining tree, to help visualize clustering of related genes and to identify orthologues and paralogues.

### Hybridisation

[0457] The term “hybridisation” as defined herein is a process wherein substantially homologous complementary nucleotide sequences anneal to each other. The hybridisation process can occur entirely in solution, i.e. both complementary nucleic acids are in solution. The hybridisation process can also occur with one of the complementary nucleic acids immobilised to a matrix such as magnetic beads, Sepharose beads or any other resin. The hybridisation process can furthermore occur with one of the complementary nucleic acids immobilised to a solid support such as a nitro-cellulose or nylon membrane or immobilised by e.g. photolithography to, for example, a siliceous glass support (the latter known as nucleic acid arrays or microarrays or as nucleic acid chips). In order to allow hybridisation to occur, the nucleic acid molecules are generally thermally or chemically denatured to melt a double strand into two single strands and/or to remove hairpins or other secondary structures from single stranded nucleic acids.

[0458] The term “stringency” refers to the conditions under which a hybridisation takes place. The stringency of hybridisation is influenced by conditions such as temperature, salt concentration, ionic strength and hybridisation buffer composition. Generally, low stringency conditions are selected to be about 30° C. lower than the thermal melting point (Tₘ) for the specific sequence at a defined ionic strength and pH. Medium stringency conditions are when the temperature is 20° C. below Tₘ, and high stringency conditions are when the temperature is 10° C. below Tₘ. High stringency hybridisation conditions are typically used for isolating hybridising sequences that have high sequence similarity to the target nucleic acid sequence. However, nucleic acids may deviate in sequence and still encode a substantially identical polypeptide, due to the degeneracy of the genetic code. Therefore medium stringency hybridisation conditions may sometimes be needed to identify such nucleic acid molecules.

[0459] The Tₘ is the temperature under defined ionic strength and pH, at which 50% of the target sequence hybridises to a perfectly matched probe. The Tₘ is dependent upon the solution conditions and the base composition and length of the probe. For example, longer sequences hybridise specifically at higher temperatures. The maximum rate of hybridisation is obtained from about 16° C. up to 32° C. below Tₘ. The presence of monovalent cations in the hybridisation solution reduce the electrostatic repulsion between the two nucleic acid strands thereby promoting hybrid formation; this effect is visible for sodium concentrations of up to 0.4M (for higher concentrations, this effect may be ignored). Formamide reduces the melting temperature of DNA-DNA and DNA-RNA duplexes with 0.6 to 0.7° C. for each percent formamide, and addition of 50% formamide allows hybridisation to be performed at 30 to 45° C., though the rate of hybridisation will be lowered. Base pair mismatches reduce the hybridisation rate and the thermal stability of the duplexes. On average and for large probes, the Tm decreases about 1° C. per % base mismatch. The Tₘ may be calculated using the following equations, depending on the types of hybrids:

1) DNA-DNA hybrids (Meinkoth and Wahl, Anal. Biochem., 138: 267-284, 1984):

Tₘ=81.5° C.+16.6×log₁₀[Na⁺]^{a}+0.41×%[G/C^{b}]−500×[L^{c}]⁻¹−0.61×% formamide

2) DNA-RNA or RNA-RNA hybrids:

Tₘ=79.8° C.+18.5(log₁₀[Na⁺]^{a}+0.58(% G/C^{b})+11.8(% G/C^{b})²−820/L^{c}

3) oligo-DNA or oligo-RNA_{d} hybrids:

For <20 nucleotides: Tₘ=2(Iₙ)

For 20-35 nucleotides: Tₘ=22+1.46(Iₙ)

^{a} or for other monovalent cation, but only accurate in the 0.01-0.4 M range.^{b} only accurate for % GC in the 30% to 75% range.^{c} L=length of duplex in base pairs.^{d} oligo, oligonucleotide; Iₙ,=effective length of primer=2×(no. of G/C)+(no. of A/T).

[0460] Non-specific binding may be controlled using any one of a number of known techniques such as, for example, blocking the membrane with protein containing solutions, additions of heterologous RNA, DNA, and SDS to the hybridisation buffer, and treatment with Rnase. For non-homologous probes, a series of hybridizations may be performed by varying one of (i) progressively lowering the annealing temperature (for example from 68° C. to 42° C.) or (ii) progressively lowering the formamide concentration (for example from 50% to 0%). The skilled artisan is aware of various parameters which may be altered during hybridisation and which will either maintain or change the stringency conditions.

[0461] Besides the hybridisation conditions, specificity of hybridisation typically also depends on the function of post-hybridisation washes. To remove background resulting from non-specific hybridisation, samples are washed with dilute salt solutions. Critical factors of such washes include the ionic strength and temperature of the final wash solution: the lower the salt concentration and the higher the wash temperature, the higher the stringency of the wash. Wash conditions are typically performed at or below hybridisation stringency. A positive hybridisation gives a signal that is at least twice of that of the background. Generally, suitable stringent conditions for nucleic acid hybridisation assays or gene amplification detection procedures are as set forth above. More or less stringent conditions may also be selected. The skilled artisan is aware of various parameters which may be altered during washing and which will either maintain or change the stringency conditions.

[0462] For example, typical high stringency hybridisation conditions for DNA hybrids longer than 50 nucleotides encompass hybridisation at 65° C. in 1×SSC or at 42° C. in 1×SSC and 50% formamide, followed by washing at 65° C. in 0.3×SSC. Examples of medium stringency hybridisation conditions for DNA hybrids longer than 50 nucleotides encompass hybridisation at 50° C. in 4×SSC or at 40° C. in 6×SSC and 50% formamide, followed by washing at 50° C. in 2×SSC. The length of the hybrid is the anticipated length for the hybridising nucleic acid. When nucleic acids of known sequence are hybridised, the hybrid length may be determined by aligning the sequences and identifying the conserved regions described herein. 1×SSC is 0.15M NaCl and 15 mM sodium citrate; the hybridisation solution and wash solutions may additionally include 5×Denhardt's reagent, 0.5-1.0% SDS, 100 μg/ml denatured, fragmented salmon sperm DNA, 0.5% sodium pyrophosphate.

[0463] For the purposes of defining the level of stringency, reference can be made to Sambrook et al. (2001) Molecular Cloning: a laboratory manual, 3rd Edition, Cold Spring Harbor Laboratory Press, CSH, New York or to Current Protocols in Molecular Biology, John Wiley & Sons, N.Y. (1989 and yearly updates).

### Splice Variant

[0464] The term “splice variant” as used herein encompasses variants of a nucleic acid sequence in which selected introns and/or exons have been excised, replaced, displaced or added, or in which introns have been shortened or lengthened. Such variants will be ones in which the biological activity of the protein is substantially retained; this may be achieved by selectively retaining functional segments of the protein. Such splice variants may be found in nature or may be manmade. Methods for predicting and isolating such splice variants are well known in the art (see for example Foissac and Schiex (2005) BMC Bioinformatics 6: 25).

### Allelic Variant

[0465] “Alleles” or “allelic variants” are alternative forms of a given gene, located at the same chromosomal position. Allelic variants encompass Single Nucleotide Polymorphisms (SNPs), as well as Small Insertion/Deletion Polymorphisms (INDELs). The size of INDELs is usually less than 100 bp. SNPs and INDELs form the largest set of sequence variants in naturally occurring polymorphic strains of most organisms.

### Endogenous Gene

[0466] Reference herein to an “endogenous” gene not only refers to the gene in question as found in a plant in its natural form (i.e., without there being any human intervention), but also refers to that same gene (or a substantially homologous nucleic acid/gene) in an isolated form subsequently (re)introduced into a plant (a transgene). For example, a transgenic plant containing such a transgene may encounter a substantial reduction of the transgene expression and/or substantial reduction of expression of the endogenous gene. The isolated gene may be isolated from an organism or may be manmade, for example by chemical synthesis.

### Gene Shuffling/Directed Evolution

[0467] “Gene shuffling” or “directed evolution” consists of iterations of DNA shuffling followed by appropriate screening and/or selection to generate variants of nucleic acids or portions thereof encoding proteins having a modified biological activity (Castle et al., (2004) Science 304(5674): 1151-4; U.S. Pat. Nos. 5,811,238 and 6,395,547).

### Construct

[0468] Artificial DNA (such as but, not limited to plasmids or viral DNA) capable of replication in a host cell and used for introduction of a DNA sequence of interest into a host cell or host organism. Host cells of the invention may be any cell selected from bacterial cells, such as Escherichia coli or Agrobacterium species cells, yeast cells, fungal, algal or cyanobacterial cells or plant cells. The skilled artisan is well aware of the genetic elements that must be present on the genetic construct in order to successfully transform, select and propagate host cells containing the sequence of interest. The sequence of interest is operably linked to one or more control sequences (at least to a promoter) as described herein. Additional regulatory elements may include transcriptional as well as translational enhancers. Those skilled in the art will be aware of terminator and enhancer sequences that may be suitable for use in performing the invention. An intron sequence may also be added to the 5′ untranslated region (UTR) or in the coding sequence to increase the amount of the mature message that accumulates in the cytosol, as described in the definitions section. Other control sequences (besides promoter, enhancer, silencer, intron sequences, 3′UTR and/or 5′UTR regions) may be protein and/or RNA stabilizing elements. Such sequences would be known or may readily be obtained by a person skilled in the art.

[0469] The genetic constructs of the invention may further include an origin of replication sequence that is required for maintenance and/or replication in a specific cell type. One example is when a genetic construct is required to be maintained in a bacterial cell as an episomal genetic element (e.g. plasmid or cosmid molecule). Preferred origins of replication include, but are not limited to, the f1-ori and colE1.

[0470] For the detection of the successful transfer of the nucleic acid sequences as used in the methods of the invention and/or selection of transgenic plants comprising these nucleic acids, it is advantageous to use marker genes (or reporter genes). Therefore, the genetic construct may optionally comprise a selectable marker gene. Selectable markers are described in more detail in the “definitions” section herein. The marker genes may be removed or excised from the transgenic cell once they are no longer needed. Techniques for marker removal are known in the art, useful techniques are described above in the definitions section.

### Regulatory Element/Control Sequence/Promoter

[0471] The terms “regulatory element”, “control sequence” and “promoter” are all used interchangeably herein and are to be taken in a broad context to refer to regulatory nucleic acid sequences capable of effecting expression of the sequences to which they are ligated. The term “promoter” typically refers to a nucleic acid control sequence located upstream from the transcriptional start of a gene and which is involved in recognising and binding of RNA polymerase and other proteins, thereby directing transcription of an operably linked nucleic acid. Encompassed by the aforementioned terms are transcriptional regulatory sequences derived from a classical eukaryotic genomic gene (including the TATA box which is required for accurate transcription initiation, with or without a CCAAT box sequence) and additional regulatory elements (i.e. upstream activating sequences, enhancers and silencers) which alter gene expression in response to developmental and/or external stimuli, or in a tissue-specific manner. Also included within the term is a transcriptional regulatory sequence of a classical prokaryotic gene, in which case it may include a −35 box sequence and/or −10 box transcriptional regulatory sequences. The term “regulatory element” also encompasses a synthetic fusion molecule or derivative that confers, activates or enhances expression of a nucleic acid molecule in a cell, tissue or organ.

[0472] A “plant promoter” comprises regulatory elements, which mediate the expression of a coding sequence segment in plant cells. Accordingly, a plant promoter need not be of plant origin, but may originate from viruses or micro-organisms, for example from viruses which attack plant cells. The “plant promoter” can also originate from a plant cell, e.g. from the plant which is transformed with the nucleic acid sequence to be expressed in the inventive process and described herein. This also applies to other “plant” regulatory signals, such as “plant” terminators. The promoters upstream of the nucleotide sequences useful in the methods of the present invention can be modified by one or more nucleotide substitution(s), insertion(s) and/or deletion(s) without interfering with the functionality or activity of either the promoters, the open reading frame (ORF) or the 3′-regulatory region such as terminators or other 3′ regulatory regions which are located away from the ORF. It is furthermore possible that the activity of the promoters is increased by modification of their sequence, or that they are replaced completely by more active promoters, even promoters from heterologous organisms. For expression in plants, the nucleic acid molecule must, as described above, be linked operably to or comprise a suitable promoter which expresses the gene at the right point in time and with the required spatial expression pattern.

[0473] For the identification of functionally equivalent promoters, the promoter strength and/or expression pattern of a candidate promoter may be analysed for example by operably linking the promoter to a reporter gene and assaying the expression level and pattern of the reporter gene in various tissues of the plant. Suitable well-known reporter genes include for example beta-glucuronidase or beta-galactosidase. The promoter activity is assayed by measuring the enzymatic activity of the beta-glucuronidase or beta-galactosidase. The promoter strength and/or expression pattern may then be compared to that of a reference promoter (such as the one used in the methods of the present invention). Alternatively, promoter strength may be assayed by quantifying mRNA levels or by comparing mRNA levels of the nucleic acid used in the methods of the present invention, with mRNA levels of housekeeping genes such as 18S rRNA, using methods known in the art, such as Northern blotting with densitometric analysis of autoradiograms, quantitative real-time PCR or RT-PCR (Heid et al., 1996 Genome Methods 6: 986-994). Generally by “weak promoter” is intended a promoter that drives expression of a coding sequence at a low level. By “low level” is intended at levels of about 1/10,000 transcripts to about 1/100,000 transcripts, to about 1/500,0000 transcripts per cell. Conversely, a “strong promoter” drives expression of a coding sequence at high level, or at about 1/10 transcripts to about 1/100 transcripts to about 1/1000 transcripts per cell. Generally, by “medium strength promoter” is intended a promoter that drives expression of a coding sequence at a lower level than a strong promoter, in particular at a level that is in all instances below that obtained when under the control of a 35S CaMV promoter.

### Operably Linked

[0474] The term “operably linked” as used herein refers to a functional linkage between the promoter sequence and the gene of interest, such that the promoter sequence is able to initiate transcription of the gene of interest.

### Constitutive Promoter

[0475] A “constitutive promoter” refers to a promoter that is transcriptionally active during most, but not necessarily all, phases of growth and development and under most environmental conditions, in at least one cell, tissue or organ. Table 2a below gives examples of constitutive promoters.

TABLE 2a
Examples of constitutive promoters

| Gene Source | Reference |
|---|---|
| Actin | McElroy et al, Plant Cell, 2: 163-171, 1990 |
| HMGP | WO 2004/070039 |
| CAMV 35S | Odell et al, Nature, 313: 810-812, 1985 |
| CaMV 19S | Nilsson et al., Physiol. Plant. 100: 456-462, 1997 |
| GOS2 | de Pater et al, Plant J Nov; 2(6): 837-44, 1992, |
| | WO 2004/065596 |
| Ubiquitin | Christensen et al, Plant Mol. Biol. 18: 675-689, |
| | 1992 |
| Rice cyclophilin | Buchholz et al, Plant Mol Biol. 25(5): 837-43, 1994 |
| Maize H3 histone | Lepetit et al, Mol. Gen. Genet. 231: 276-285, 1992 |
| Alfalfa H3 histone | Wu et al. Plant Mol. Biol. 11: 641-649, 1988 |
| Actin 2 | An et al, Plant J. 10(1); 107-121, 1996 |
| 34S FMV | Sanger et al., Plant. Mol. Biol., 14, 1990: 433-443 |
| Rubisco small | U.S. Pat. No. 4,962,028 |
| subunit | |
| OCS | Leisner (1988) Proc Natl Acad Sci USA 85(5): 2553 |
| SAD1 | Jain et al., Crop Science, 39 (6), 1999: 1696 |
| SAD2 | Jain et al., Crop Science, 39 (6), 1999: 1696 |
| nos | Shaw et al. (1984) Nucleic Acids Res. 12(20): |
| | 7831-7846 |
| V-ATPase | WO 01/14572 |
| Super promoter | WO 95/14098 |
| G-box proteins | WO 94/12015 |

### Ubiquitous Promoter

[0476] A “ubiquitous promoter” is active in substantially all tissues or cells of an organism.

### Developmentally-Regulated Promoter

[0477] A “developmentally-regulated promoter” is active during certain developmental stages or in parts of the plant that undergo developmental changes.

### Inducible Promoter

[0478] An “inducible promoter” has induced or increased transcription initiation in response to a chemical (for a review see Gatz 1997, Annu. Rev. Plant Physiol. Plant Mol. Biol., 48:89-108), environmental or physical stimulus, or may be “stress-inducible”, i.e. activated when a plant is exposed to various stress conditions, or a “pathogen-inducible” i.e. activated when a plant is exposed to exposure to various pathogens.

### Organ-Specific/Tissue-Specific Promoter

[0479] An “organ-specific” or “tissue-specific promoter” is one that is capable of preferentially initiating transcription in certain organs or tissues, such as the leaves, roots, seed tissue etc. For example, a “root-specific promoter” is a promoter that is transcriptionally active predominantly in plant roots, substantially to the exclusion of any other parts of a plant, whilst still allowing for any leaky expression in these other plant parts. Promoters able to initiate transcription in certain cells only are referred to herein as “cell-specific”.

[0480] Examples of root-specific promoters are listed in Table 2b below:

TABLE 2b
Examples of root-specific promoters

| Gene Source | Reference |
|---|---|
| RCc3 | Plant Mol Biol. 1995 Jan; 27(2): 237-48 |
| Arabidopsis PHT1 | Koyama et al. J Biosci Bioeng. 2005 Jan; 99(1): 38-42.; |
| | Mudge et al. (2002, Plant J. 31: 341) |
| Medicago phosphate | Xiao et al., 2006, Plant Biol (Stuttg). 2006 Jul; 8(4): 439-49 |
| transporter | |
| Arabidopsis Pyk10 | Nitz et al. (2001) Plant Sci 161(2): 337-346 |
| root-expressible genes | Tingey et al., EMBO J. 6: 1, 1987. |
| tobacco auxin-inducible | Van der Zaal et al., Plant Mol. Biol. 16, 983, 1991. |
| gene | |
| β-tubulin | Oppenheimer, et al., Gene 63: 87, 1988. |
| tobacco root-specific | Conkling, et al., Plant Physiol. 93: 1203, 1990. |
| genes | |
| B. napus G1-3b gene | U.S. Pat. No. 5,401,836 |
| SbPRP1 | Suzuki et al., Plant Mol. Biol. 21: 109-119, 1993. |
| LRX1 | Baumberger et al. 2001, Genes & Dev. 15: 1128 |
| BTG-26 Brassica napus | US 20050044585 |
| LeAMT1 (tomato) | Lauter et al. (1996, PNAS 3: 8139) |
| The LeNRT1-1 (tomato) | Lauter et al. (1996, PNAS 3: 8139) |
| class I patatin gene | Liu et al., Plant Mol. Biol. 17 (6): 1139-1154 |
| (potato) | |
| KDC1 (Daucus carota) | Downey et al. (2000, J. Biol. Chem. 275: 39420) |
| TobRB7 gene | W Song (1997) PhD Thesis, North Carolina State University, |
| | Raleigh, NC USA |
| OsRAB5a (rice) | Wang et al. 2002, Plant Sci. 163: 273 |
| ALF5 (Arabidopsis) | Diener et al. (2001, Plant Cell 13: 1625) |
| NRT2; 1Np | Quesada et al. (1997, Plant Mol. Biol. 34: 265) |
| (N. plumbaginifolia) | |

[0481] A “seed-specific promoter” is transcriptionally active predominantly in seed tissue, but not necessarily exclusively in seed tissue (in cases of leaky expression). The seed-specific promoter may be active during seed development and/or during germination. The seed specific promoter may be endosperm/aleurone/embryo specific. Examples of seed-specific promoters (endosperm/aleurone/embryo specific) are shown in Table 2c to Table 2f below. Further examples of seed-specific promoters are given in Qing Qu and Takaiwa (Plant Biotechnol. J. 2, 113-125, 2004), which disclosure is incorporated by reference herein as if fully set forth.

TABLE 2c
Examples of seed-specific promoters

| Gene source | Reference |
|---|---|
| seed-specific genes | Simon et al., Plant Mol. Biol. 5: 191, 1985; |
| | Scofield et al., J. Biol. Chem. 262: 12202, 1987.; |
| | Baszczynski et al., Plant Mol. Biol. 14: 633, 1990. |
| Brazil Nut albumin | Pearson et al., Plant Mol. Biol. 18: 235-245, 1992. |
| legumin | Ellis et al., Plant Mol. Biol. 10: 203-214, 1988. |
| glutelin (rice) | Takaiwa et al., Mol. Gen. Genet. 208: 15-22, 1986; |
| | Takaiwa et al., FEBS Letts. 221: 43-47, 1987. |
| zein | Matzke et al Plant Mol Biol, 14(3): 323-32 1990 |
| napA | Stalberg et al, Planta 199: 515-519, 1996. |
| wheat LMW and HMW | Mol Gen Genet 216: 81-90, 1989; NAR 17: 461-2, 1989 |
| glutenin-1 | |
| wheat SPA | Albani et al, Plant Cell, 9: 171-184, 1997 |
| wheat α,β,γ-gliadins | EMBO J. 3: 1409-15, 1984 |
| barley ltr1 promoter | Diaz et al. (1995) Mol Gen Genet 248(5): 592-8 |
| barley B1, C, D, hordein | Theor Appl Gen 98: 1253-62, 1999; Plant J 4: 343-55, |
| | 1993; Mol Gen Genet 250: 750-60, 1996 |
| barley DOF | Mena et al, The Plant Journal, 116(1): 53-62, 1998 |
| blz2 | EP99106056.7 |
| synthetic promoter | Vicente-Carbajosa et al., Plant J. 13: 629-640, 1998. |
| rice prolamin NRP33 | Wu et al, Plant Cell Physiology 39(8) 885-889, 1998 |
| rice a-globulin Glb-1 | Wu et al, Plant Cell Physiology 39(8) 885-889, 1998 |
| rice OSH1 | Sato et al, Proc. Natl. Acad. Sci. USA, 93: 8117-8122, |
| | 1996 |
| rice α-globulin REB/OHP-1 | Nakase et al. Plant Mol. Biol. 33: 513-522, 1997 |
| rice ADP-glucose pyrophosphorylase | Trans Res 6: 157-68, 1997 |
| maize ESR gene family | Plant J 12: 235-46, 1997 |
| sorghum α-kafirin | DeRose et al., Plant Mol. Biol 32: 1029-35, 1996 |
| KNOX | Postma-Haarsma et al, Plant Mol. Biol. 39: 257-71, 1999 |
| rice oleosin | Wu et al, J. Biochem. 123: 386, 1998 |
| sunflower oleosin | Cummins et al., Plant Mol. Biol. 19: 873-876, 1992 |
| PRO0117, putative rice 40S | WO 2004/070039 |
| ribosomal protein | |
| PRO0136, rice alanine | unpublished |
| aminotransferase | |
| PRO0147, trypsin inhibitor | unpublished |
| ITR1 (barley) | |
| PRO0151, rice WSI18 | WO 2004/070039 |
| PRO0175, rice RAB21 | WO 2004/070039 |
| PRO005 | WO 2004/070039 |
| PRO0095 | WO 2004/070039 |
| α-amylase (Amy32b) | Lanahan et al, Plant Cell 4: 203-211, 1992; Skriver et al, |
| | Proc Natl Acad Sci USA 88: 7266-7270, 1991 |
| cathepsin β-like gene | Cejudo et al, Plant Mol Biol 20: 849-856, 1992 |
| Barley Ltp2 | Kalla et al., Plant J. 6: 849-60, 1994 |
| Chi26 | Leah et al., Plant J. 4: 579-89, 1994 |
| Maize B-Peru | Selinger et al., Genetics 149; 1125-38, 1998 |

TABLE 2d
examples of endosperm-specific promoters

| Gene source | Reference |
|---|---|
| glutelin (rice) | Takaiwa et al. (1986) Mol Gen Genet 208: 15-22; |
| | Takaiwa et al. (1987) FEBS Letts. 221: 43-47 |
| zein | Matzke et al., (1990) Plant Mol Biol 14(3): 323-32 |
| wheat LMW and | Colot et al. (1989) Mol Gen Genet 216: 81-90, |
| HMW glutenin-1 | Anderson et al. (1989) NAR 17: 461-2 |
| wheat SPA | Albani et al. (1997) Plant Cell 9: 171-184 |
| wheat gliadins | Rafalski et al. (1984) EMBO 3: 1409-15 |
| barley ltr1 promoter | Diaz et al. (1995) Mol Gen Genet 248(5): 592-8 |
| barley B1, C, D, | Cho et al. (1999) Theor Appl Genet 98: 1253-62; |
| hordein | Muller et al. (1993) Plant J 4: 343-55; |
| | Sorenson et al. (1996) Mol Gen Genet 250: 750-60 |
| barley DOF | Mena et al, (1998) Plant J 116(1): 53-62 |
| blz2 | Onate et al. (1999) J Biol Chem 274(14): 9175-82 |
| synthetic promoter | Vicente-Carbajosa et al. (1998) Plant J 13: 629-640 |
| rice prolamin | Wu et al, (1998) Plant Cell Physiol 39(8) 885-889 |
| NRP33 | |
| rice globulin Glb-1 | Wu et al. (1998) Plant Cell Physiol 39(8) 885-889 |
| rice globulin | Nakase et al. (1997) Plant Molec Biol 33: 513-522 |
| REB/OHP-1 | |
| rice ADP-glucose | Russell et al. (1997) Trans Res 6: 157-68 |
| pyrophosphorylase | |
| maize ESR gene | Opsahl-Ferstad et al. (1997) Plant J 12: 235-46 |
| family | |
| sorghum kafirin | DeRose et al. (1996) Plant Mol Biol 32: 1029-35 |

TABLE 2e
Examples of embryo specific promoters:

| Gene | |
|---|---|
| source | Reference |
| rice OSH1 | Sato et al, Proc. Natl. Acad. Sci. USA, 93: 8117-8122, 1996 |
| KNOX | Postma-Haarsma et al, Plant Mol. Biol. 39: 257-71, 1999 |
| PRO0151 | WO 2004/070039 |
| PRO0175 | WO 2004/070039 |
| PRO005 | WO 2004/070039 |
| PRO0095 | WO 2004/070039 |

TABLE 2f
Examples of aleurone-specific promoters:

| Gene source | Reference |
|---|---|
| α-amylase (Amy32b) | Lanahan et al, Plant Cell 4: 203-211, 1992; |
| | Skriver et al, Proc Natl Acad Sci USA 88: |
| | 7266-7270, 1991 |
| cathepsin β-like gene | Cejudo et al, Plant Mol Biol 20: 849-856, 1992 |
| Barley Ltp2 | Kalla et al., Plant J. 6: 849-60, 1994 |
| Chi26 | Leah et al., Plant J. 4: 579-89, 1994 |
| Maize B-Peru | Selinger et al., Genetics 149; 1125-38, 1998 |

[0482] A “green tissue-specific promoter” as defined herein is a promoter that is transcriptionally active predominantly in green tissue, substantially to the exclusion of any other parts of a plant, whilst still allowing for any leaky expression in these other plant parts.

[0483] Examples of green tissue-specific promoters which may be used to perform the methods of the invention are shown in Table 2g below.

TABLE 2g
Examples of green tissue-specific promoters

| Gene | Expression | Reference |
|---|---|---|
| Maize Orthophosphate | Leaf specific | Fukavama et al., Plant Physiol. |
| dikinase | | 2001 Nov; 127(3): 1136-46 |
| Maize | Leaf specific | Kausch et al., Plant Mol Biol. |
| Phosphoenolpyruvate | | 2001 Jan; 45(1): 1-15 |
| carboxylase | | |
| Rice | Leaf specific | Lin et al., 2004 DNA Seq. 2004 |
| Phosphoenolpyruvate | | Aug; 15(4): 269-76 |
| carboxylase | | |
| Rice small subunit | Leaf specific | Nomura et al., Plant Mol Biol. |
| Rubisco | | 2000 Sep; 44(1): 99-106 |
| rice beta expansin | Shoot specific | WO 2004/070039 |
| EXBP9 | | |
| Pigeonpea small | Leaf specific | Panguluri et al., Indian J Exp |
| subunit Rubisco | | Biol. 2005 Apr; 43(4): 369-72 |
| Pea RBCS3A | Leaf specific | |

[0484] Another example of a tissue-specific promoter is a meristem-specific promoter, which is transcriptionally active predominantly in meristematic tissue, substantially to the exclusion of any other parts of a plant, whilst still allowing for any leaky expression in these other plant parts. Examples of green meristem-specific promoters which may be used to perform the methods of the invention are shown in Table 2h below.

TABLE 2h
Examples of meristem-specific promoters

| Gene source | Expression pattern | Reference |
|---|---|---|
| rice OSH1 | Shoot apical meristem, | Sato et al. (1996) |
| | from embryo globular stage | Proc. Natl. Acad. Sci. |
| | to seedling stage | USA, 93: 8117-8122 |
| Rice metallothionein | Meristem specific | BAD87835.1 |
| WAK1 & WAK 2 | Shoot and root apical | Wagner & Kohorn |
| | meristems, and in | (2001) Plant Cell |
| | expanding leaves and | 13(2): 303-318 |
| | sepals | |

### Terminator

[0485] The term “terminator” encompasses a control sequence which is a DNA sequence at the end of a transcriptional unit which signals 3′ processing and polyadenylation of a primary transcript and termination of transcription. The terminator can be derived from the natural gene, from a variety of other plant genes, or from T-DNA. The terminator to be added may be derived from, for example, the nopaline synthase or octopine synthase genes, or alternatively from another plant gene, or less preferably from any other eukaryotic gene.

### Selectable Marker (Gene)/Reporter Gene

[0486] “Selectable marker”, “selectable marker gene” or “reporter gene” includes any gene that confers a phenotype on a cell in which it is expressed to facilitate the identification and/or selection of cells that are transfected or transformed with a nucleic acid construct of the invention. These marker genes enable the identification of a successful transfer of the nucleic acid molecules via a series of different principles. Suitable markers may be selected from markers that confer antibiotic or herbicide resistance, that introduce a new metabolic trait or that allow visual selection. Examples of selectable marker genes include genes conferring resistance to antibiotics (such as nptII that phosphorylates neomycin and kanamycin, or hpt, phosphorylating hygromycin, or genes conferring resistance to, for example, bleomycin, streptomycin, tetracyclin, chloramphenicol, ampicillin, gentamycin, geneticin (G418), spectinomycin or blasticidin), to herbicides (for example bar which provides resistance to Basta®; aroA or gox providing resistance against glyphosate, or the genes conferring resistance to, for example, imidazolinone, phosphinothricin or sulfonylurea), or genes that provide a metabolic trait (such as manA that allows plants to use mannose as sole carbon source or xylose isomerase for the utilisation of xylose, or antinutritive markers such as the resistance to 2-deoxyglucose). Expression of visual marker genes results in the formation of colour (for example β-glucuronidase, GUS or β-galactosidase with its coloured substrates, for example X-Gal), luminescence (such as the luciferin/luceferase system) or fluorescence (Green Fluorescent Protein, GFP, and derivatives thereof). This list represents only a small number of possible markers. The skilled worker is familiar with such markers. Different markers are preferred, depending on the organism and the selection method.

[0487] It is known that upon stable or transient integration of nucleic acids into plant cells, only a minority of the cells takes up the foreign DNA and, if desired, integrates it into its genome, depending on the expression vector used and the transfection technique used. To identify and select these integrants, a gene coding for a selectable marker (such as the ones described above) is usually introduced into the host cells together with the gene of interest. These markers can for example be used in mutants in which these genes are not functional by, for example, deletion by conventional methods. Furthermore, nucleic acid molecules encoding a selectable marker can be introduced into a host cell on the same vector that comprises the sequence encoding the polypeptides of the invention or used in the methods of the invention, or else in a separate vector. Cells which have been stably transfected with the introduced nucleic acid can be identified for example by selection (for example, cells which have integrated the selectable marker survive whereas the other cells die).

[0488] Since the marker genes, particularly genes for resistance to antibiotics and herbicides, are no longer required or are undesired in the transgenic host cell once the nucleic acids have been introduced successfully, the process according to the invention for introducing the nucleic acids advantageously employs techniques which enable the removal or excision of these marker genes. One such a method is what is known as co-transformation. The co-transformation method employs two vectors simultaneously for the transformation, one vector bearing the nucleic acid according to the invention and a second bearing the marker gene(s). A large proportion of transformants receives or, in the case of plants, comprises (up to 40% or more of the transformants), both vectors. In case of transformation with Agrobacteria, the transformants usually receive only a part of the vector, i.e. the sequence flanked by the T-DNA, which usually represents the expression cassette. The marker genes can subsequently be removed from the transformed plant by performing crosses. In another method, marker genes integrated into a transposon are used for the transformation together with desired nucleic acid (known as the Ac/Ds technology). The transformants can be crossed with a transposase source or the transformants are transformed with a nucleic acid construct conferring expression of a transposase, transiently or stable. In some cases (approx. 10%), the transposon jumps out of the genome of the host cell once transformation has taken place successfully and is lost. In a further number of cases, the transposon jumps to a different location. In these cases the marker gene must be eliminated by performing crosses. In microbiology, techniques were developed which make possible, or facilitate, the detection of such events. A further advantageous method relies on what is known as recombination systems; whose advantage is that elimination by crossing can be dispensed with. The best-known system of this type is what is known as the Cre/Iox system. Cre1 is a recombinase that removes the sequences located between the IoxP sequences. If the marker gene is integrated between the IoxP sequences, it is removed once transformation has taken place successfully, by expression of the recombinase. Further recombination systems are the HIN/HIX, FLP/FRT and REP/STB system (Tribble et al., J. Biol. Chem., 275, 2000: 22255-22267; Velmurugan et al., J. Cell Biol., 149, 2000: 553-566). A site-specific integration into the plant genome of the nucleic acid sequences according to the invention is possible. Naturally, these methods can also be applied to microorganisms such as yeast, fungi or bacteria.

### Transgenic/Transgene/Recombinant

[0489] For the purposes of the invention, “transgenic”, “transgene” or “recombinant” means with regard to, for example, a nucleic acid sequence, an expression cassette, gene construct or a vector comprising the nucleic acid sequence or an organism transformed with the nucleic acid sequences, expression cassettes or vectors according to the invention, all those constructions brought about by recombinant methods in which either
[0490] (a) the nucleic acid sequences encoding proteins useful in the methods of the invention, or
[0491] (b) genetic control sequence(s) which is operably linked with the nucleic acid sequence according to the invention, for example a promoter, or
[0492] (c) a) and b)
   are not located in their natural genetic environment or have been modified by recombinant methods, it being possible for the modification to take the form of, for example, a substitution, addition, deletion, inversion or insertion of one or more nucleotide residues. The natural genetic environment is understood as meaning the natural genomic or chromosomal locus in the original plant or the presence in a genomic library. In the case of a genomic library, the natural genetic environment of the nucleic acid sequence is preferably retained, at least in part. The environment flanks the nucleic acid sequence at least on one side and has a sequence length of at least 50 bp, preferably at least 500 bp, especially preferably at least 1000 bp, most preferably at least 5000 bp. A naturally occurring expression cassette—for example the naturally occurring combination of the natural promoter of the nucleic acid sequences with the corresponding nucleic acid sequence encoding a polypeptide useful in the methods of the present invention, as defined above—becomes a transgenic expression cassette when this expression cassette is modified by non-natural, synthetic (“artificial”) methods such as, for example, mutagenic treatment. Suitable methods are described, for example, in U.S. Pat. No. 5,565,350 or WO 00/15815.

[0493] A transgenic plant for the purposes of the invention is thus understood as meaning, as above, that the nucleic acids used in the method of the invention are not present in, or originating from, the genome of said plant, or are present in the genome of said plant but not at their natural locus in the genome of said plant, it being possible for the nucleic acids to be expressed homologously or heterologously. However, as mentioned, transgenic also means that, while the nucleic acids according to the invention or used in the inventive method are at their natural position in the genome of a plant, the sequence has been modified with regard to the natural sequence, and/or that the regulatory sequences of the natural sequences have been modified. Transgenic is preferably understood as meaning the expression of the nucleic acids according to the invention at an unnatural locus in the genome, i.e. homologous or, preferably, heterologous expression of the nucleic acids takes place. Preferred transgenic plants are mentioned herein.

[0494] It shall further be noted that in the context of the present invention, the term “isolated nucleic acid” or “isolated polypeptide” may in some instances be considered as a synonym for a “recombinant nucleic acid” or a “recombinant polypeptide”, respectively and refers to a nucleic acid or polypeptide that is not located in its natural genetic environment and/or that has been modified by recombinant methods.

### Modulation

[0495] The term “modulation” means in relation to expression or gene expression, a process in which the expression level is changed by said gene expression in comparison to the control plant, the expression level may be increased or decreased. The original, unmodulated expression may be of any kind of expression of a structural RNA (rRNA, tRNA) or mRNA with subsequent translation. For the purposes of this invention, the original unmodulated expression may also be absence of any expression. The term “modulating the activity” shall mean any change of the expression of the inventive nucleic acid sequences or encoded proteins, which leads to increased yield and/or increased growth of the plants. The expression can increase from zero (absence of, or immeasurable expression) to a certain amount, or can decrease from a certain amount to immeasurable small amounts or zero.

### Expression

[0496] The term “expression” or “gene expression” means the transcription of a specific gene or specific genes or specific genetic construct. The term “expression” or “gene expression” in particular means the transcription of a gene or genes or genetic construct into structural RNA (rRNA, tRNA) or mRNA with or without subsequent translation of the latter into a protein. The process includes transcription of DNA and processing of the resulting mRNA product.

### Increased Expression/Overexpression

[0497] The term “increased expression” or “overexpression” as used herein means any form of expression that is additional to the original wild-type expression level. For the purposes of this invention, the original wild-type expression level might also be zero, i.e. absence of expression or immeasurable expression.

[0498] Methods for increasing expression of genes or gene products are well documented in the art and include, for example, overexpression driven by appropriate promoters, the use of transcription enhancers or translation enhancers. Isolated nucleic acids which serve as promoter or enhancer elements may be introduced in an appropriate position (typically upstream) of a non-heterologous form of a polynucleotide so as to upregulate expression of a nucleic acid encoding the polypeptide of interest. For example, endogenous promoters may be altered in vivo by mutation, deletion, and/or substitution (see, Kmiec, U.S. Pat. No. 5,565,350; Zarling et al., WO9322443), or isolated promoters may be introduced into a plant cell in the proper orientation and distance from a gene of the present invention so as to control the expression of the gene.

[0499] If polypeptide expression is desired, it is generally desirable to include a polyadenylation region at the 3′-end of a polynucleotide coding region. The polyadenylation region can be derived from the natural gene, from a variety of other plant genes, or from T-DNA. The 3′ end sequence to be added may be derived from, for example, the nopaline synthase or octopine synthase genes, or alternatively from another plant gene, or less preferably from any other eukaryotic gene.

[0500] An intron sequence may also be added to the 5′ untranslated region (UTR) or the coding sequence of the partial coding sequence to increase the amount of the mature message that accumulates in the cytosol. Inclusion of a spliceable intron in the transcription unit in both plant and animal expression constructs has been shown to increase gene expression at both the mRNA and protein levels up to 1000-fold (Buchman and Berg (1988) Mol. Cell. biol. 8: 4395-4405; Callis et al. (1987) Genes Dev 1:1183-1200). Such intron enhancement of gene expression is typically greatest when placed near the 5′ end of the transcription unit. Use of the maize introns Adh1-S intron 1, 2, and 6, the Bronze-1 intron are known in the art. For general information see: The Maize Handbook, Chapter 116, Freeling and Walbot, Eds., Springer, N.Y. (1994).

### Decreased Expression

[0501] Reference herein to “decreased expression” or “reduction or substantial elimination” of expression is taken to mean a decrease in endogenous gene expression and/or polypeptide levels and/or polypeptide activity relative to control plants. The reduction or substantial elimination is in increasing order of preference at least 10%, 20%, 30%, 40% or 50%, 60%, 70%, 80%, 85%, 90%, or 95%, 96%, 97%, 98%, 99% or more reduced compared to that of control plants.

[0502] For the reduction or substantial elimination of expression an endogenous gene in a plant, a sufficient length of substantially contiguous nucleotides of a nucleic acid sequence is required. In order to perform gene silencing, this may be as little as 20, 19, 18, 17, 16, 15, 14, 13, 12, 11, 10 or fewer nucleotides, alternatively this may be as much as the entire gene (including the 5′ and/or 3′ UTR, either in part or in whole). The stretch of substantially contiguous nucleotides may be derived from the nucleic acid encoding the protein of interest (target gene), or from any nucleic acid capable of encoding an orthologue, paralogue or homologue of the protein of interest. Preferably, the stretch of substantially contiguous nucleotides is capable of forming hydrogen bonds with the target gene (either sense or antisense strand), more preferably, the stretch of substantially contiguous nucleotides has, in increasing order of preference, 50%, 60%, 70%, 80%, 85%, 90%, 95%, 96%, 97%, 98%, 99%, 100% sequence identity to the target gene (either sense or antisense strand). A nucleic acid sequence encoding a (functional) polypeptide is not a requirement for the various methods discussed herein for the reduction or substantial elimination of expression of an endogenous gene.

[0503] This reduction or substantial elimination of expression may be achieved using routine tools and techniques. A preferred method for the reduction or substantial elimination of endogenous gene expression is by introducing and expressing in a plant a genetic construct into which the nucleic acid (in this case a stretch of substantially contiguous nucleotides derived from the gene of interest, or from any nucleic acid capable of encoding an orthologue, paralogue or homologue of any one of the protein of interest) is cloned as an inverted repeat (in part or completely), separated by a spacer (non-coding DNA).

[0504] In such a preferred method, expression of the endogenous gene is reduced or substantially eliminated through RNA-mediated silencing using an inverted repeat of a nucleic acid or a part thereof (in this case a stretch of substantially contiguous nucleotides derived from the gene of interest, or from any nucleic acid capable of encoding an orthologue, paralogue or homologue of the protein of interest), preferably capable of forming a hairpin structure. The inverted repeat is cloned in an expression vector comprising control sequences. A non-coding DNA nucleic acid sequence (a spacer, for example a matrix attachment region fragment (MAR), an intron, a polylinker, etc.) is located between the two inverted nucleic acids forming the inverted repeat. After transcription of the inverted repeat, a chimeric RNA with a self-complementary structure is formed (partial or complete). This double-stranded RNA structure is referred to as the hairpin RNA (hpRNA). The hpRNA is processed by the plant into siRNAs that are incorporated into an RNA-induced silencing complex (RISC). The RISC further cleaves the mRNA transcripts, thereby substantially reducing the number of mRNA transcripts to be translated into polypeptides. For further general details see for example, Grierson et al. (1998) WO 98/53083; Waterhouse et al. (1999) WO 99/53050).

[0505] Performance of the methods of the invention does not rely on introducing and expressing in a plant a genetic construct into which the nucleic acid is cloned as an inverted repeat, but any one or more of several well-known “gene silencing” methods may be used to achieve the same effects.

[0506] One such method for the reduction of endogenous gene expression is RNA-mediated silencing of gene expression (downregulation). Silencing in this case is triggered in a plant by a double stranded RNA sequence (dsRNA) that is substantially similar to the target endogenous gene. This dsRNA is further processed by the plant into about 20 to about 26 nucleotides called short interfering RNAs (siRNAs). The siRNAs are incorporated into an RNA-induced silencing complex (RISC) that cleaves the mRNA transcript of the endogenous target gene, thereby substantially reducing the number of mRNA transcripts to be translated into a polypeptide. Preferably, the double stranded RNA sequence corresponds to a target gene.

[0507] Another example of an RNA silencing method involves the introduction of nucleic acid sequences or parts thereof (in this case a stretch of substantially contiguous nucleotides derived from the gene of interest, or from any nucleic acid capable of encoding an orthologue, paralogue or homologue of the protein of interest) in a sense orientation into a plant. “Sense orientation” refers to a DNA sequence that is homologous to an mRNA transcript thereof. Introduced into a plant would therefore be at least one copy of the nucleic acid sequence. The additional nucleic acid sequence will reduce expression of the endogenous gene, giving rise to a phenomenon known as co-suppression. The reduction of gene expression will be more pronounced if several additional copies of a nucleic acid sequence are introduced into the plant, as there is a positive correlation between high transcript levels and the triggering of co-suppression.

[0508] Another example of an RNA silencing method involves the use of antisense nucleic acid sequences. An “antisense” nucleic acid sequence comprises a nucleotide sequence that is complementary to a “sense” nucleic acid sequence encoding a protein, i.e. complementary to the coding strand of a double-stranded cDNA molecule or complementary to an mRNA transcript sequence. The antisense nucleic acid sequence is preferably complementary to the endogenous gene to be silenced. The complementarity may be located in the “coding region” and/or in the “non-coding region” of a gene. The term “coding region” refers to a region of the nucleotide sequence comprising codons that are translated into amino acid residues. The term “non-coding region” refers to 5′ and 3′ sequences that flank the coding region that are transcribed but not translated into amino acids (also referred to as 5′ and 3′ untranslated regions).

[0509] Antisense nucleic acid sequences can be designed according to the rules of Watson and Crick base pairing. The antisense nucleic acid sequence may be complementary to the entire nucleic acid sequence (in this case a stretch of substantially contiguous nucleotides derived from the gene of interest, or from any nucleic acid capable of encoding an orthologue, paralogue or homologue of the protein of interest), but may also be an oligonucleotide that is antisense to only a part of the nucleic acid sequence (including the mRNA 5′ and 3′ UTR). For example, the antisense oligonucleotide sequence may be complementary to the region surrounding the translation start site of an mRNA transcript encoding a polypeptide. The length of a suitable antisense oligonucleotide sequence is known in the art and may start from about 50, 45, 40, 35, 30, 25, 20, 15 or 10 nucleotides in length or less. An antisense nucleic acid sequence according to the invention may be constructed using chemical synthesis and enzymatic ligation reactions using methods known in the art. For example, an antisense nucleic acid sequence (e.g., an antisense oligonucleotide sequence) may be chemically synthesized using naturally occurring nucleotides or variously modified nucleotides designed to increase the biological stability of the molecules or to increase the physical stability of the duplex formed between the antisense and sense nucleic acid sequences, e.g., phosphorothioate derivatives and acridine substituted nucleotides may be used. Examples of modified nucleotides that may be used to generate the antisense nucleic acid sequences are well known in the art. Known nucleotide modifications include methylation, cyclization and ‘caps’ and substitution of one or more of the naturally occurring nucleotides with an analogue such as inosine. Other modifications of nucleotides are well known in the art.

[0510] The antisense nucleic acid sequence can be produced biologically using an expression vector into which a nucleic acid sequence has been subcloned in an antisense orientation (i.e., RNA transcribed from the inserted nucleic acid will be of an antisense orientation to a target nucleic acid of interest). Preferably, production of antisense nucleic acid sequences in plants occurs by means of a stably integrated nucleic acid construct comprising a promoter, an operably linked antisense oligonucleotide, and a terminator.

[0511] The nucleic acid molecules used for silencing in the methods of the invention (whether introduced into a plant or generated in situ) hybridize with or bind to mRNA transcripts and/or genomic DNA encoding a polypeptide to thereby inhibit expression of the protein, e.g., by inhibiting transcription and/or translation. The hybridization can be by conventional nucleotide complementarity to form a stable duplex, or, for example, in the case of an antisense nucleic acid sequence which binds to DNA duplexes, through specific interactions in the major groove of the double helix. Antisense nucleic acid sequences may be introduced into a plant by transformation or direct injection at a specific tissue site. Alternatively, antisense nucleic acid sequences can be modified to target selected cells and then administered systemically. For example, for systemic administration, antisense nucleic acid sequences can be modified such that they specifically bind to receptors or antigens expressed on a selected cell surface, e.g., by linking the antisense nucleic acid sequence to peptides or antibodies which bind to cell surface receptors or antigens. The antisense nucleic acid sequences can also be delivered to cells using the vectors described herein.

[0512] According to a further aspect, the antisense nucleic acid sequence is an a-anomeric nucleic acid sequence. An a-anomeric nucleic acid sequence forms specific double-stranded hybrids with complementary RNA in which, contrary to the usual b-units, the strands run parallel to each other (Gaultier et al. (1987) Nucl Ac Res 15: 6625-6641). The antisense nucleic acid sequence may also comprise a 2′-o-methylribonucleotide (Inoue et al. (1987) Nucl Ac Res 15, 6131-6148) or a chimeric RNA-DNA analogue (Inoue et al. (1987) FEBS Lett. 215, 327-330).

[0513] The reduction or substantial elimination of endogenous gene expression may also be performed using ribozymes. Ribozymes are catalytic RNA molecules with ribonuclease activity that are capable of cleaving a single-stranded nucleic acid sequence, such as an mRNA, to which they have a complementary region. Thus, ribozymes (e.g., hammerhead ribozymes (described in Haselhoff and Gerlach (1988) Nature 334, 585-591) can be used to catalytically cleave mRNA transcripts encoding a polypeptide, thereby substantially reducing the number of mRNA transcripts to be translated into a polypeptide. A ribozyme having specificity for a nucleic acid sequence can be designed (see for example: Cech et al. U.S. Pat. No. 4,987,071; and Cech et al. U.S. Pat. No. 5,116,742). Alternatively, mRNA transcripts corresponding to a nucleic acid sequence can be used to select a catalytic RNA having a specific ribonuclease activity from a pool of RNA molecules (Bartel and Szostak (1993) Science 261, 1411-1418). The use of ribozymes for gene silencing in plants is known in the art (e.g., Atkins et al. (1994) WO 94/00012; Lenne et al. (1995) WO 95/03404; Lutziger et al. (2000) WO 00/00619; Prinsen et al. (1997) WO 97/13865 and Scott et al. (1997) WO 97/38116).

[0514] Gene silencing may also be achieved by insertion mutagenesis (for example, T-DNA insertion or transposon insertion) or by strategies as described by, among others, Angell and Baulcombe ((1999) Plant J 20(3): 357-62), (Amplicon VIGS WO 98/36083), or Baulcombe (WO 99/15682).

[0515] Gene silencing may also occur if there is a mutation on an endogenous gene and/or a mutation on an isolated gene/nucleic acid subsequently introduced into a plant. The reduction or substantial elimination may be caused by a non-functional polypeptide. For example, the polypeptide may bind to various interacting proteins; one or more mutation(s) and/or truncation(s) may therefore provide for a polypeptide that is still able to bind interacting proteins (such as receptor proteins) but that cannot exhibit its normal function (such as signalling ligand).

[0516] A further approach to gene silencing is by targeting nucleic acid sequences complementary to the regulatory region of the gene (e.g., the promoter and/or enhancers) to form triple helical structures that prevent transcription of the gene in target cells. See Helene, C., Anticancer Drug Res. 6, 569-84, 1991; Helene et al., Ann. N.Y. Acad. Sci. 660, 27-36 1992; and Maher, L. J. Bioassays 14, 807-15, 1992.

[0517] Other methods, such as the use of antibodies directed to an endogenous polypeptide for inhibiting its function in planta, or interference in the signalling pathway in which a polypeptide is involved, will be well known to the skilled man. In particular, it can be envisaged that manmade molecules may be useful for inhibiting the biological function of a target polypeptide, or for interfering with the signalling pathway in which the target polypeptide is involved.

[0518] Alternatively, a screening program may be set up to identify in a plant population natural variants of a gene, which variants encode polypeptides with reduced activity. Such natural variants may also be used for example, to perform homologous recombination.

[0519] Artificial and/or natural microRNAs (miRNAs) may be used to knock out gene expression and/or mRNA translation. Endogenous miRNAs are single stranded small RNAs of typically 19-24 nucleotides long. They function primarily to regulate gene expression and/or mRNA translation. Most plant microRNAs (miRNAs) have perfect or near-perfect complementarity with their target sequences. However, there are natural targets with up to five mismatches. They are processed from longer non-coding RNAs with characteristic fold-back structures by double-strand specific RNases of the Dicer family. Upon processing, they are incorporated in the RNA-induced silencing complex (RISC) by binding to its main component, an Argonaute protein. MiRNAs serve as the specificity components of RISC, since they base-pair to target nucleic acids, mostly mRNAs, in the cytoplasm. Subsequent regulatory events include target mRNA cleavage and destruction and/or translational inhibition. Effects of miRNA overexpression are thus often reflected in decreased mRNA levels of target genes.

[0520] Artificial microRNAs (amiRNAs), which are typically 21 nucleotides in length, can be genetically engineered specifically to negatively regulate gene expression of single or multiple genes of interest. Determinants of plant microRNA target selection are well known in the art. Empirical parameters for target recognition have been defined and can be used to aid in the design of specific amiRNAs, (Schwab et al., Dev. Cell 8, 517-527, 2005). Convenient tools for design and generation of amiRNAs and their precursors are also available to the public (Schwab et al., Plant Cell 18, 1121-1133, 2006).

[0521] For optimal performance, the gene silencing techniques used for reducing expression in a plant of an endogenous gene requires the use of nucleic acid sequences from monocotyledonous plants for transformation of monocotyledonous plants, and from dicotyledonous plants for transformation of dicotyledonous plants. Preferably, a nucleic acid sequence from any given plant species is introduced into that same species. For example, a nucleic acid sequence from rice is transformed into a rice plant. However, it is not an absolute requirement that the nucleic acid sequence to be introduced originates from the same plant species as the plant in which it will be introduced. It is sufficient that there is substantial homology between the endogenous target gene and the nucleic acid to be introduced.

[0522] Described above are examples of various methods for the reduction or substantial elimination of expression in a plant of an endogenous gene. A person skilled in the art would readily be able to adapt the aforementioned methods for silencing so as to achieve reduction of expression of an endogenous gene in a whole plant or in parts thereof through the use of an appropriate promoter, for example.

### Transformation

[0523] The term “introduction” or “transformation” as referred to herein encompasses the transfer of an exogenous polynucleotide into a host cell, irrespective of the method used for transfer. Plant tissue capable of subsequent clonal propagation, whether by organogenesis or embryogenesis, may be transformed with a genetic construct of the present invention and a whole plant regenerated there from. The particular tissue chosen will vary depending on the clonal propagation systems available for, and best suited to, the particular species being transformed. Exemplary tissue targets include leaf disks, pollen, embryos, cotyledons, hypocotyls, megagametophytes, callus tissue, existing meristematic tissue (e.g., apical meristem, axillary buds, and root meristems), and induced meristem tissue (e.g., cotyledon meristem and hypocotyl meristem). The polynucleotide may be transiently or stably introduced into a host cell and may be maintained non-integrated, for example, as a plasmid. Alternatively, it may be integrated into the host genome. The resulting transformed plant cell may then be used to regenerate a transformed plant in a manner known to persons skilled in the art. Alternatively, a plant cell that cannot be regenerated into a plant may be chosen as host cell, i.e. the resulting transformed plant cell does not have the capacity to regenerate into a (whole) plant.

[0524] The transfer of foreign genes into the genome of a plant is called transformation. Transformation of plant species is now a fairly routine technique. Advantageously, any of several transformation methods may be used to introduce the gene of interest into a suitable ancestor cell. The methods described for the transformation and regeneration of plants from plant tissues or plant cells may be utilized for transient or for stable transformation. Transformation methods include the use of liposomes, electroporation, chemicals that increase free DNA uptake, injection of the DNA directly into the plant, particle gun bombardment, transformation using viruses or pollen and microprojection. Methods may be selected from the calcium/polyethylene glycol method for protoplasts (Krens, F. A. et al., (1982) Nature 296, 72-74; Negrutiu I et al. (1987) Plant Mol Biol 8: 363-373); electroporation of protoplasts (Shillito R. D. et al. (1985) Bio/Technol 3, 1099-1102); microinjection into plant material (Crossway A et al., (1986) Mol. Gen. Genet. 202: 179-185); DNA or RNA-coated particle bombardment (Klein T M et al., (1987) Nature 327: 70) infection with (non-integrative) viruses and the like. Transgenic plants, including transgenic crop plants, are preferably produced via Agrobacterium-mediated transformation. An advantageous transformation method is the transformation in planta. To this end, it is possible, for example, to allow the agrobacteria to act on plant seeds or to inoculate the plant meristem with agrobacteria. It has proved particularly expedient in accordance with the invention to allow a suspension of transformed agrobacteria to act on the intact plant or at least on the flower primordia. The plant is subsequently grown on until the seeds of the treated plant are obtained (Clough and Bent, Plant J. (1998) 16, 735-743). Methods for Agrobacterium-mediated transformation of rice include well known methods for rice transformation, such as those described in any of the following: European patent application EP 1198985 A1, Aldemita and Hodges (Planta 199: 612-617, 1996); Chan et al. (Plant Mol Biol 22 (3): 491-506, 1993), Hiei et al. (Plant J 6 (2): 271-282, 1994), which disclosures are incorporated by reference herein as if fully set forth. In the case of corn transformation, the preferred method is as described in either Ishida et al. (Nat. Biotechnol 14(6): 745-50, 1996) or Frame et al. (Plant Physiol 129(1): 13-22, 2002), which disclosures are incorporated by reference herein as if fully set forth. Said methods are further described by way of example in B. Jenes et al., Techniques for Gene Transfer, in: Transgenic Plants, Vol. 1, Engineering and Utilization, eds. S. D. Kung and R. Wu, Academic Press (1993) 128-143 and in Potrykus Annu. Rev. Plant Physiol. Plant Molec. Biol. 42 (1991) 205-225). The nucleic acids or the construct to be expressed is preferably cloned into a vector, which is suitable for transforming Agrobacterium tumefaciens, for example pBin19 (Bevan et al., Nucl. Acids Res. 12 (1984) 8711). Agrobacteria transformed by such a vector can then be used in known manner for the transformation of plants, such as plants used as a model, like Arabidopsis (Arabidopsis thaliana is within the scope of the present invention not considered as a crop plant), or crop plants such as, by way of example, tobacco plants, for example by immersing bruised leaves or chopped leaves in an agrobacterial solution and then culturing them in suitable media. The transformation of plants by means of Agrobacterium tumefaciens is described, for example, by Höfgen and Willmitzer in Nucl. Acid Res. (1988) 16, 9877 or is known inter alia from F. F. White, Vectors for Gene Transfer in Higher Plants; in Transgenic Plants, Vol. 1, Engineering and Utilization, eds. S. D. Kung and R. Wu, Academic Press, 1993, pp. 15-38.

[0525] In addition to the transformation of somatic cells, which then have to be regenerated into intact plants, it is also possible to transform the cells of plant meristems and in particular those cells which develop into gametes. In this case, the transformed gametes follow the natural plant development, giving rise to transgenic plants. Thus, for example, seeds of Arabidopsis are treated with agrobacteria and seeds are obtained from the developing plants of which a certain proportion is transformed and thus transgenic [Feldman, K A and Marks M D (1987). Mol Gen Genet. 208:1-9; Feldmann K (1992). In: C Koncz, N-H Chua and J Shell, eds, Methods in Arabidopsis Research. Word Scientific, Singapore, pp. 274-289]. Alternative methods are based on the repeated removal of the inflorescences and incubation of the excision site in the center of the rosette with transformed agrobacteria, whereby transformed seeds can likewise be obtained at a later point in time (Chang (1994). Plant J. 5: 551-558; Katavic (1994). Mol Gen Genet, 245: 363-370). However, an especially effective method is the vacuum infiltration method with its modifications such as the “floral dip” method. In the case of vacuum infiltration of Arabidopsis, intact plants under reduced pressure are treated with an agrobacterial suspension [Bechthold, N (1993). C R Acad Sci Paris Life Sci, 316: 1194-1199], while in the case of the “floral dip” method the developing floral tissue is incubated briefly with a surfactant-treated agrobacterial suspension [Clough, S J and Bent A F (1998) The Plant J. 16, 735-743]. A certain proportion of transgenic seeds are harvested in both cases, and these seeds can be distinguished from non-transgenic seeds by growing under the above-described selective conditions. In addition the stable transformation of plastids is of advantages because plastids are inherited maternally is most crops reducing or eliminating the risk of transgene flow through pollen. The transformation of the chloroplast genome is generally achieved by a process which has been schematically displayed in Klaus et al., 2004 [Nature Biotechnology 22 (2), 225-229]. Briefly the sequences to be transformed are cloned together with a selectable marker gene between flanking sequences homologous to the chloroplast genome. These homologous flanking sequences direct site specific integration into the plastome. Plastidal transformation has been described for many different plant species and an overview is given in Bock (2001) Transgenic plastids in basic research and plant biotechnology. J Mol. Biol. 2001 Sep. 21; 312 (3):425-38 or Maliga, P (2003) Progress towards commercialization of plastid transformation technology. Trends Biotechnol. 21, 20-28. Further biotechnological progress has recently been reported in form of marker free plastid transformants, which can be produced by a transient co-integrated maker gene (Klaus et al., 2004, Nature Biotechnology 22(2), 225-229).

[0526] The genetically modified plant cells can be regenerated via all methods with which the skilled worker is familiar. Suitable methods can be found in the above-mentioned publications by S. D. Kung and R. Wu, Potrykus or Höfgen and Willmitzer. Alternatively, the genetically modified plant cells are non-regenerable into a whole plant.

[0527] Generally after transformation, plant cells or cell groupings are selected for the presence of one or more markers which are encoded by plant-expressible genes co-transferred with the gene of interest, following which the transformed material is regenerated into a whole plant. To select transformed plants, the plant material obtained in the transformation is, as a rule, subjected to selective conditions so that transformed plants can be distinguished from untransformed plants. For example, the seeds obtained in the above-described manner can be planted and, after an initial growing period, subjected to a suitable selection by spraying. A further possibility consists in growing the seeds, if appropriate after sterilization, on agar plates using a suitable selection agent so that only the transformed seeds can grow into plants. Alternatively, the transformed plants are screened for the presence of a selectable marker such as the ones described above.

[0528] Following DNA transfer and regeneration, putatively transformed plants may also be evaluated, for instance using Southern analysis, for the presence of the gene of interest, copy number and/or genomic organisation. Alternatively or additionally, expression levels of the newly introduced DNA may be monitored using Northern and/or Western analysis, both techniques being well known to persons having ordinary skill in the art.

[0529] The generated transformed plants may be propagated by a variety of means, such as by clonal propagation or classical breeding techniques. For example, a first generation (or T1) transformed plant may be selfed and homozygous second-generation (or T2) transformants selected, and the T2 plants may then further be propagated through classical breeding techniques. The generated transformed organisms may take a variety of forms. For example, they may be chimeras of transformed cells and non-transformed cells; clonal transformants (e.g., all cells transformed to contain the expression cassette); grafts of transformed and untransformed tissues (e.g., in plants, a transformed rootstock grafted to an untransformed scion).

### T-DNA Activation Tagging

[0530] “T-DNA activation” tagging (Hayashi et al. Science (1992) 1350-1353), involves insertion of T-DNA, usually containing a promoter (may also be a translation enhancer or an intron), in the genomic region of the gene of interest or 10 kb up- or downstream of the coding region of a gene in a configuration such that the promoter directs expression of the targeted gene. Typically, regulation of expression of the targeted gene by its natural promoter is disrupted and the gene falls under the control of the newly introduced promoter. The promoter is typically embedded in a T-DNA. This T-DNA is randomly inserted into the plant genome, for example, through Agrobacterium infection and leads to modified expression of genes near the inserted T-DNA. The resulting transgenic plants show dominant phenotypes due to modified expression of genes close to the introduced promoter.

### Tilling

[0531] The term “TILLING” is an abbreviation of “Targeted Induced Local Lesions In Genomes” and refers to a mutagenesis technology useful to generate and/or identify nucleic acids encoding proteins with modified expression and/or activity. TILLING also allows selection of plants carrying such mutant variants. These mutant variants may exhibit modified expression, either in strength or in location or in timing (if the mutations affect the promoter for example). These mutant variants may exhibit higher activity than that exhibited by the gene in its natural form. TILLING combines high-density mutagenesis with high-throughput screening methods. The steps typically followed in TILLING are: (a) EMS mutagenesis (Redei G P and Koncz C (1992) In Methods in Arabidopsis Research, Koncz C, Chua N H, Schell J, eds. Singapore, World Scientific Publishing Co, pp. 16-82; Feldmann et al., (1994) In Meyerowitz E M, Somerville C R, eds, Arabidopsis. Cold Spring Harbor Laboratory Press, Cold Spring Harbor, N.Y., pp 137-172; Lightner J and Caspar T (1998) In J Martinez-Zapater, J Salinas, eds, Methods on Molecular Biology, Vol. 82. Humana Press, Totowa, N.J., pp 91-104); (b) DNA preparation and pooling of individuals; (c) PCR amplification of a region of interest; (d) denaturation and annealing to allow formation of heteroduplexes; (e) DHPLC, where the presence of a heteroduplex in a pool is detected as an extra peak in the chromatogram; (f) identification of the mutant individual; and (g) sequencing of the mutant PCR product. Methods for TILLING are well known in the art (McCallum et al., (2000) Nat Biotechnol 18: 455-457; reviewed by Stemple (2004) Nat Rev Genet. 5(2): 145-50).

### Homologous Recombination

[0532] “Homologous recombination” allows introduction in a genome of a selected nucleic acid at a defined selected position. Homologous recombination is a standard technology used routinely in biological sciences for lower organisms such as yeast or the moss Physcomitrella. Methods for performing homologous recombination in plants have been described not only for model plants (Offringa et al. (1990) EMBO J. 9(10): 3077-84) but also for crop plants, for example rice (Terada et al. (2002) Nat Biotech 20(10): 1030-4; lida and Terada (2004) Curr Opin Biotech 15(2): 132-8), and approaches exist that are generally applicable regardless of the target organism (Miller et al, Nature Biotechnol. 25, 778-785, 2007).

### Yield Related Trait(s)

[0533] A “Yield related trait” is a trait or feature which is related to plant yield. Yield-related traits may comprise one or more of the following non-limitative list of features: early flowering time, yield, biomass, seed yield, early vigour, greenness index, growth rate, agronomic traits, such as e.g. tolerance to submergence (which leads to yield in rice), Water Use Efficiency (WUE), Nitrogen Use Efficiency (NUE), etc.

[0534] Reference herein to enhanced yield-related traits, relative to of control plants is taken to mean one or more of an increase in early vigour and/or in biomass (weight) of one or more parts of a plant, which may include (i) aboveground parts and preferably aboveground harvestable parts and/or (ii) parts below ground and preferably harvestable below ground. In particular, such harvestable parts are seeds.

### Yield

[0535] The term “yield” in general means a measurable produce of economic value, typically related to a specified crop, to an area, and to a period of time. Individual plant parts directly contribute to yield based on their number, size and/or weight, or the actual yield is the yield per square meter for a crop and year, which is determined by dividing total production (includes both harvested and appraised production) by planted square meters.

[0536] The terms “yield” of a plant and “plant yield” are used interchangeably herein and are meant to refer to vegetative biomass such as root and/or shoot biomass, to reproductive organs, and/or to propagules such as seeds of that plant.

[0537] Flowers in maize are unisexual; male inflorescences (tassels) originate from the apical stem and female inflorescences (ears) arise from axillary bud apices. The female inflorescence produces pairs of spikelets on the surface of a central axis (cob). Each of the female spikelets encloses two fertile florets, one of them will usually mature into a maize kernel once fertilized. Hence a yield increase in maize may be manifested as one or more of the following: increase in the number of plants established per square meter, an increase in the number of ears per plant, an increase in the number of rows, number of kernels per row, kernel weight, thousand kernel weight, ear length/diameter, increase in the seed filling rate, which is the number of filled florets (i.e. florets containing seed) divided by the total number of florets and multiplied by 100), among others.

[0538] Inflorescences in rice plants are named panicles. The panicle bears spikelets, which are the basic units of the panicles, and which consist of a pedicel and a floret. The floret is borne on the pedicel and includes a flower that is covered by two protective glumes: a larger glume (the lemma) and a shorter glume (the palea). Hence, taking rice as an example, a yield increase may manifest itself as an increase in one or more of the following: number of plants per square meter, number of panicles per plant, panicle length, number of spikelets per panicle, number of flowers (or florets) per panicle; an increase in the seed filling rate which is the number of filled florets (i.e. florets containing seeds) divided by the total number of florets and multiplied by 100; an increase in thousand kernel weight, among others.

### Early Flowering Time

[0539] Plants having an “early flowering time” as used herein are plants which start to flower earlier than control plants. Hence this term refers to plants that show an earlier start of flowering. Flowering time of plants can be assessed by counting the number of days (“time to flower”) between sowing and the emergence of a first inflorescence. The “flowering time” of a plant can for instance be determined using the method as described in WO 2007/093444.

### Early Vigour

[0540] “Early vigour” refers to active healthy well-balanced growth especially during early stages of plant growth, and may result from increased plant fitness due to, for example, the plants being better adapted to their environment (i.e. optimizing the use of energy resources and partitioning between shoot and root). Plants having early vigour also show increased seedling survival and a better establishment of the crop, which often results in highly uniform fields (with the crop growing in uniform manner, i.e. with the majority of plants reaching the various stages of development at substantially the same time), and often better and higher yield. Therefore, early vigour may be determined by measuring various factors, such as thousand kernel weight, percentage germination, percentage emergence, seedling growth, seedling height, root length, root and shoot biomass and many more.

### Increased Growth Rate

[0541] The increased growth rate may be specific to one or more parts of a plant (including seeds), or may be throughout substantially the whole plant. Plants having an increased growth rate may have a shorter life cycle. The life cycle of a plant may be taken to mean the time needed to grow from a mature seed up to the stage where the plant has produced mature seeds, similar to the starting material. This life cycle may be influenced by factors such as speed of germination, early vigour, growth rate, greenness index, flowering time and speed of seed maturation. The increase in growth rate may take place at one or more stages in the life cycle of a plant or during substantially the whole plant life cycle. Increased growth rate during the early stages in the life cycle of a plant may reflect enhanced vigour. The increase in growth rate may alter the harvest cycle of a plant allowing plants to be sown later and/or harvested sooner than would otherwise be possible (a similar effect may be obtained with earlier flowering time). If the growth rate is sufficiently increased, it may allow for the further sowing of seeds of the same plant species (for example sowing and harvesting of rice plants followed by sowing and harvesting of further rice plants all within one conventional growing period). Similarly, if the growth rate is sufficiently increased, it may allow for the further sowing of seeds of different plants species (for example the sowing and harvesting of corn plants followed by, for example, the sowing and optional harvesting of soybean, potato or any other suitable plant). Harvesting additional times from the same rootstock in the case of some crop plants may also be possible. Altering the harvest cycle of a plant may lead to an increase in annual biomass production per square meter (due to an increase in the number of times (say in a year) that any particular plant may be grown and harvested). An increase in growth rate may also allow for the cultivation of transgenic plants in a wider geographical area than their wild-type counterparts, since the territorial limitations for growing a crop are often determined by adverse environmental conditions either at the time of planting (early season) or at the time of harvesting (late season). Such adverse conditions may be avoided if the harvest cycle is shortened. The growth rate may be determined by deriving various parameters from growth curves, such parameters may be: T-Mid (the time taken for plants to reach 50% of their maximal size) and T-90 (time taken for plants to reach 90% of their maximal size), amongst others.

### Stress Resistance

[0542] An increase in yield and/or growth rate occurs whether the plant is under non-stress conditions or whether the plant is exposed to various stresses compared to control plants. Plants typically respond to exposure to stress by growing more slowly. In conditions of severe stress, the plant may even stop growing altogether. Mild stress on the other hand is defined herein as being any stress to which a plant is exposed which does not result in the plant ceasing to grow altogether without the capacity to resume growth. Mild stress in the sense of the invention leads to a reduction in the growth of the stressed plants of less than 40%, 35%, 30% or 25%, more preferably less than 20% or 15% in comparison to the control plant under non-stress conditions. Due to advances in agricultural practices (irrigation, fertilization, pesticide treatments) severe stresses are not often encountered in cultivated crop plants. As a consequence, the compromised growth induced by mild stress is often an undesirable feature for agriculture. Abiotic stresses may be due to drought or excess water, anaerobic stress, salt stress, chemical toxicity, oxidative stress and hot, cold or freezing temperatures.

[0543] “Biotic stresses” are typically those stresses caused by pathogens, such as bacteria, viruses, fungi, nematodes and insects.

[0544] The “abiotic stress” may be an osmotic stress caused by a water stress, e.g. due to drought, salt stress, or freezing stress. Abiotic stress may also be an oxidative stress or a cold stress. “Freezing stress” is intended to refer to stress due to freezing temperatures, i.e. temperatures at which available water molecules freeze and turn into ice. “Cold stress”, also called “chilling stress”, is intended to refer to cold temperatures, e.g. temperatures below 10°, or preferably below 5° C., but at which water molecules do not freeze. As reported in Wang et al. (Planta (2003) 218: 1-14), abiotic stress leads to a series of morphological, physiological, biochemical and molecular changes that adversely affect plant growth and productivity. Drought, salinity, extreme temperatures and oxidative stress are known to be interconnected and may induce growth and cellular damage through similar mechanisms. Rabbani et al. (Plant Physiol (2003) 133: 1755-1767) describes a particularly high degree of “cross talk” between drought stress and high-salinity stress. For example, drought and/or salinisation are manifested primarily as osmotic stress, resulting in the disruption of homeostasis and ion distribution in the cell. Oxidative stress, which frequently accompanies high or low temperature, salinity or drought stress, may cause denaturing of functional and structural proteins. As a consequence, these diverse environmental stresses often activate similar cell signalling pathways and cellular responses, such as the production of stress proteins, up-regulation of anti-oxidants, accumulation of compatible solutes and growth arrest. The term “non-stress” conditions as used herein are those environmental conditions that allow optimal growth of plants. Persons skilled in the art are aware of normal soil conditions and climatic conditions for a given location. Plants with optimal growth conditions, (grown under non-stress conditions) typically yield in increasing order of preference at least 97%, 95%, 92%, 90%, 87%, 85%, 83%, 80%, 77% or 75% of the average production of such plant in a given environment. Average production may be calculated on harvest and/or season basis. Persons skilled in the art are aware of average yield productions of a crop.

[0545] In particular, the methods of the present invention may be performed under non-stress conditions. In an example, the methods of the present invention may be performed under non-stress conditions such as mild drought to give plants having increased yield relative to control plants.

[0546] In another embodiment, the methods of the present invention may be performed under stress conditions.

[0547] In an example, the methods of the present invention may be performed under stress conditions such as drought to give plants having increased yield relative to control plants.

[0548] In another example, the methods of the present invention may be performed under stress conditions such as nutrient deficiency to give plants having increased yield relative to control plants.

[0549] Nutrient deficiency may result from a lack of nutrients such as nitrogen, phosphates and other phosphorous-containing compounds, potassium, calcium, magnesium, manganese, iron and boron, amongst others.

[0550] In yet another example, the methods of the present invention may be performed under stress conditions such as salt stress to give plants having increased yield relative to control plants. The term salt stress is not restricted to common salt (NaCl), but may be any one or more of: NaCl, KCl, LiCl, MgCl₂, CaCl₂, amongst others.

[0551] In yet another example, the methods of the present invention may be performed under stress conditions such as cold stress or freezing stress to give plants having increased yield relative to control plants.

### Increase/Improve/Enhance

[0552] The terms “increase”, “improve” or “enhance” are interchangeable and shall mean in the sense of the application at least a 3%, 4%, 5%, 6%, 7%, 8%, 9% or 10%, preferably at least 15% or 20%, more preferably 25%, 30%, 35% or 40% more yield and/or growth in comparison to control plants as defined herein.

### Seed Yield

[0553] Increased seed yield may manifest itself as one or more of the following:
[0554] a) an increase in seed biomass (total seed weight) which may be on an individual seed basis and/or per plant and/or per square meter;
[0555] b) increased number of flowers per plant;
[0556] c) increased number of seeds;
[0557] d) increased seed filling rate (which is expressed as the ratio between the number of filled florets divided by the total number of florets);
[0558] e) increased harvest index, which is expressed as a ratio of the yield of harvestable parts, such as seeds, divided by the biomass of aboveground plant parts; and
[0559] f) increased thousand kernel weight (TKW), which is extrapolated from the number of seeds counted and their total weight. An increased TKW may result from an increased seed size and/or seed weight, and may also result from an increase in embryo and/or endosperm size.

[0560] The terms “filled florets” and “filled seeds” may be considered synonyms.

[0561] An increase in seed yield may also be manifested as an increase in seed size and/or seed volume. Furthermore, an increase in seed yield may also manifest itself as an increase in seed area and/or seed length and/or seed width and/or seed perimeter.

### Greenness Index

[0562] The “greenness index” as used herein is calculated from digital images of plants. For each pixel belonging to the plant object on the image, the ratio of the green value versus the red value (in the RGB model for encoding color) is calculated. The greenness index is expressed as the percentage of pixels for which the green-to-red ratio exceeds a given threshold. Under normal growth conditions, under salt stress growth conditions, and under reduced nutrient availability growth conditions, the greenness index of plants is measured in the last imaging before flowering. In contrast, under drought stress growth conditions, the greenness index of plants is measured in the first imaging after drought.

### Biomass

[0563] The term “biomass” as used herein is intended to refer to the total weight of a plant. Within the definition of biomass, a distinction may be made between the biomass of one or more parts of a plant, which may include any one or more of the following:
[0564] aboveground parts such as but not limited to shoot biomass, seed biomass, leaf biomass, etc.;
[0565] aboveground harvestable parts such as but not limited to shoot biomass, seed biomass, leaf biomass, etc.;
[0566] parts below ground, such as but not limited to root biomass, tubers, bulbs, etc.;
[0567] harvestable parts below ground, such as but not limited to root biomass, tubers, bulbs, etc.;
[0568] harvestable parts partially below ground such as but not limited to beets and other hypocotyl areas of a plant, rhizomes, stolons or creeping rootstalks;
[0569] vegetative biomass such as root biomass, shoot biomass, etc.;
[0570] reproductive organs; and
[0571] propagules such as seed.

### Marker Assisted Breeding

[0572] Such breeding programmes sometimes require introduction of allelic variation by mutagenic treatment of the plants, using for example EMS mutagenesis; alternatively, the programme may start with a collection of allelic variants of so called “natural” origin caused unintentionally. Identification of allelic variants then takes place, for example, by PCR. This is followed by a step for selection of superior allelic variants of the sequence in question and which give increased yield. Selection is typically carried out by monitoring growth performance of plants containing different allelic variants of the sequence in question. Growth performance may be monitored in a greenhouse or in the field. Further optional steps include crossing plants in which the superior allelic variant was identified with another plant. This could be used, for example, to make a combination of interesting phenotypic features.

### Use as Probes in (Gene Mapping)

[0573] Use of nucleic acids encoding the protein of interest for genetically and physically mapping the genes requires only a nucleic acid sequence of at least 15 nucleotides in length. These nucleic acids may be used as restriction fragment length polymorphism (RFLP) markers. Southern blots (Sambrook J, Fritsch E F and Maniatis T (1989) Molecular Cloning, A Laboratory Manual) of restriction-digested plant genomic DNA may be probed with the nucleic acids encoding the protein of interest. The resulting banding patterns may then be subjected to genetic analyses using computer programs such as MapMaker (Lander et al. (1987) Genomics 1: 174-181) in order to construct a genetic map. In addition, the nucleic acids may be used to probe Southern blots containing restriction endonuclease-treated genomic DNAs of a set of individuals representing parent and progeny of a defined genetic cross. Segregation of the DNA polymorphisms is noted and used to calculate the position of the nucleic acid encoding the protein of interest in the genetic map previously obtained using this population (Botstein et al. (1980) Am. J. Hum. Genet. 32:314-331).

[0574] The production and use of plant gene-derived probes for use in genetic mapping is described in Bernatzky and Tanksley (1986) Plant Mol. Biol. Reporter 4: 37-41. Numerous publications describe genetic mapping of specific cDNA clones using the methodology outlined above or variations thereof. For example, F2 intercross populations, backcross populations, randomly mated populations, near isogenic lines, and other sets of individuals may be used for mapping. Such methodologies are well known to those skilled in the art.

[0575] The nucleic acid probes may also be used for physical mapping (i.e., placement of sequences on physical maps; see Hoheisel et al. In: Non-mammalian Genomic Analysis: A Practical Guide, Academic press 1996, pp. 319-346, and references cited therein).

[0576] In another embodiment, the nucleic acid probes may be used in direct fluorescence in situ hybridisation (FISH) mapping (Trask (1991) Trends Genet. 7:149-154). Although current methods of FISH mapping favour use of large clones (several kb to several hundred kb; see Laan et al. (1995) Genome Res. 5:13-20), improvements in sensitivity may allow performance of FISH mapping using shorter probes.

[0577] A variety of nucleic acid amplification-based methods for genetic and physical mapping may be carried out using the nucleic acids. Examples include allele-specific amplification (Kazazian (1989) J. Lab. Clin. Med. 11:95-96), polymorphism of PCR-amplified fragments (CAPS; Sheffield et al. (1993) Genomics 16:325-332), allele-specific ligation (Landegren et al. (1988) Science 241:1077-1080), nucleotide extension reactions (Sokolov (1990) Nucleic Acid Res. 18:3671), Radiation Hybrid Mapping (Walter et al. (1997) Nat. Genet. 7:22-28) and Happy Mapping (Dear and Cook (1989) Nucleic Acid Res. 17:6795-6807). For these methods, the sequence of a nucleic acid is used to design and produce primer pairs for use in the amplification reaction or in primer extension reactions. The design of such primers is well known to those skilled in the art. In methods employing PCR-based genetic mapping, it may be necessary to identify DNA sequence differences between the parents of the mapping cross in the region corresponding to the instant nucleic acid sequence. This, however, is generally not necessary for mapping methods.

### Plant

[0578] The term “plant” as used herein encompasses whole plants, ancestors and progeny of the plants and plant parts, including seeds, shoots, stems, leaves, roots (including tubers), flowers, and tissues and organs, wherein each of the aforementioned comprise the gene/nucleic acid of interest. The term “plant” also encompasses plant cells, suspension cultures, callus tissue, embryos, meristematic regions, gametophytes, sporophytes, pollen and microspores, again wherein each of the aforementioned comprises the gene/nucleic acid of interest.

[0579] Plants that are particularly useful in the methods of the invention include all plants which belong to the superfamily Viridiplantae, in particular monocotyledonous and dicotyledonous plants including fodder or forage legumes, ornamental plants, food crops, trees or shrubs selected from the list comprising Acer spp., Actinidia spp., Abelmoschus spp., Agave sisalana, Agropyron spp., Agrostis stolonifera, Allium spp., Amaranthus spp., Ammophila arenaria, Ananas comosus, Annona spp., Apium graveolens, Arachis spp, Artocarpus spp., Asparagus officinalis, Avena spp. (e.g. Avena sativa, Avena fatua, Avena byzantina, Avena fatua var. sativa, Avena hybrida), Averrhoa carambola, Bambusa sp., Benincasa hispida, Bertholletia excelsea, Beta vulgaris, Brassica spp. (e.g. Brassica napus, Brassica rapa ssp. [canola, oilseed rape, turnip rape]), Cadaba farinosa, Camellia sinensis, Canna indica, Cannabis sativa, Capsicum spp., Carex elata, Carica papaya, Carissa macrocarpa, Carya spp., Carthamus tinctorius, Castanea spp., Ceiba pentandra, Cichorium endivia, Cinnamomum spp., Citrullus lanatus, Citrus spp., Cocos spp., Coffea spp., Colocasia esculenta, Cola spp., Corchorus sp., Coriandrum sativum, Corylus spp., Crataegus spp., Crocus sativus, Cucurbita spp., Cucumis spp., Cynara spp., Daucus carota, Desmodium spp., Dimocarpus longan, Dioscorea spp., Diospyros spp., Echinochloa spp., Elaeis (e.g. Elaeis guineensis, Elaeis oleifera), Eleusine coracana, Eragrostis tef, Erianthus sp., Eriobotrya japonica, Eucalyptus sp., Eugenia uniflora, Fagopyrum spp., Fagus spp., Festuca arundinacea, Ficus carica, Fortunella spp., Fragaria spp., Ginkgo biloba, Glycine spp. (e.g. Glycine max, Soja hispida or Soja max), Gossypium hirsutum, Helianthus spp. (e.g. Helianthus annuus), Hemerocallis fulva, Hibiscus spp., Hordeum spp. (e.g. Hordeum vulgare), Ipomoea batatas, Juglans spp., Lactuca sativa, Lathyrus spp., Lens culinaris, Linum usitatissimum, Litchi chinensis, Lotus spp., Luffa acutangula, Lupinus spp., Luzula sylvatica, Lycopersicon spp. (e.g. Lycopersicon esculentum, Lycopersicon lycopersicum, Lycopersicon pyriforme), Macrotyloma spp., Malus spp., Malpighia emarginata, Mammea americana, Mangifera indica, Manihot spp., Manilkara zapota, Medicago sativa, Melilotus spp., Mentha spp., Miscanthus sinensis, Momordica spp., Morus nigra, Musa spp., Nicotiana spp., Olea spp., Opuntia spp., Ornithopus spp., Oryza spp. (e.g. Oryza sativa, Oryza latifolia), Panicum miliaceum, Panicum virgatum, Passiflora edulis, Pastinaca sativa, Pennisetum sp., Persea spp., Petroselinum crispum, Phalaris arundinacea, Phaseolus spp., Phleum pratense, Phoenix spp., Phragmites australis, Physalis spp., Pinus spp., Pistacia vera, Pisum spp., Poa spp., Populus spp., Prosopis spp., Prunus spp., Psidium spp., Punica granatum, Pyrus communis, Quercus spp., Raphanus sativus, Rheum rhabarbarum, Ribes spp., Ricinus communis, Rubus spp., Saccharum spp., Salix sp., Sambucus spp., Secale cereale, Sesamum spp., Sinapis sp., Solanum spp. (e.g. Solanum tuberosum, Solanum integrifolium or Solanum lycopersicum), Sorghum bicolor, Spinacia spp., Syzygium spp., Tagetes spp., Tamarindus indica, Theobroma cacao, Trifolium spp., Tripsacum dactyloides, Triticosecale rimpaui, Triticum spp. (e.g. Triticum aestivum, Triticum durum, Triticum turgidum, Triticum hybernum, Triticum macha, Triticum sativum, Triticum monococcum or Triticum vulgare), Tropaeolum minus, Tropaeolum majus, Vaccinium spp., Vicia spp., Vigna spp., Viola odorata, Vitis spp., Zea mays, Zizania palustris, Ziziphus spp., amongst others.

### Control Plant(s)

[0580] The choice of suitable control plants is a routine part of an experimental setup and may include corresponding wild type plants or corresponding plants without the gene of interest. The control plant is typically of the same plant species or even of the same variety as the plant to be assessed. The control plant may also be a nullizygote of the plant to be assessed. Nullizygotes (or null control plants) are individuals missing the transgene by segregation. Further, control plants are grown under equal growing conditions to the growing conditions of the plants of the invention, i.e. in the vicinity of, and simultaneously with, the plants of the invention. A “control plant” as used herein refers not only to whole plants, but also to plant parts, including seeds and seed parts.

### DESCRIPTION OF FIGURES

[0581] The present invention will now be described with reference to the following figures in which:

[0582] FIG. 1 represents the domain structure of SEQ ID NO: 2 with conserved motifs.

[0583] FIG. 2 represents the domain structure of SEQ ID NO: 4 with conserved motifs.

[0584] FIG. 3 represents a multiple alignment of various DUF642 polypeptides. These alignments can be used for defining further motifs or signature sequences, when using conserved amino acids. The corresponding SEQ ID NO's for the aligned polypeptide sequences shown in FIG. 3 are:

| Annotation | SEQ ID NO: |
|---|---|
| A. lyrata_340195 | 58 |
| A. thaliana_AT1G80240.1 | 68 |
| B. napus_TC65362 | 72 |
| B. napus_TC77368 | 74 |
| O. sativa_LOC_Os01g42520.1 | 6 |
| P. virgatum_TC46275 | 18 |
| S. bicolor_Sb03g027650.1 | 20 |
| Z. mays_TC458850 | 36 |
| Zea_mays_GRMZM2G034985_T02 | 42 |
| T. aestivum_c60008104@11410 | 34 |
| O. sativa_LOC_Os04g41710.1 | 8 |
| O. sativa_LOC_Os04g41740.1 | 10 |
| Os_DUF642.3 | 2 |
| O. sativa_LOC_Os04g41750.1 | 12 |
| S. bicolor_Sb06g021280.1 | 24 |
| Z. mays_ZM07MC22756_BFb0088A01@22693 | 40 |
| Zea_mays_GRMZM2G051898_T01 | 44 |
| S. bicolor_Sb06g021290.1 | 26 |
| O. sativa_LOC_Os04g41759.1 | 14 |
| S. bicolor_Sb06g021320.1 | 32 |
| S. bicolor_Sb06g021300.1 | 28 |
| Z. mays_TC468877 | 38 |
| S. bicolor_Sb06g021310.1 | 30 |
| O. sativa_LOC_Os04g41770.1 | 16 |
| S. bicolor_Sb06g021270.1 | 22 |
| Zea_mays_GRMZM2G051912_T01 | 46 |
| Zea_mays_GRMZM2G405071_T01 | 48 |
| O. sativa_LOC_Os02g11040.1 | 50 |
| Os_DUF642.2 | 4 |
| P. virgatum_TC392 | 52 |
| S. bicolor_Sb04g007160.1 | 54 |
| Z. mays_TC467870 | 56 |
| P. sitchensis_TA14284_3332 | 122 |
| P. taeda_TA10429_3352 | 124 |
| A. lyrata_912808 | 62 |
| A. thaliana_AT1G29980.1 | 66 |
| A. lyrata_934049 | 64 |
| C. annuum_TC19321 | 78 |
| S. tuberosum_TC189725 | 150 |
| J. hindsii_x_regia_TA1156_432290 | 102 |
| G. hirsutum_TC135941 | 84 |
| G. raimondii_TC1124 | 96 |
| G. max_GM06MC25068_saa05g06@24507 | 92 |
| G. max_TC286277 | 94 |
| L. japonicus_TC41787 | 104 |
| M. domestica_TC32901 | 108 |
| P. trifoliata_TA6477_37690 | 134 |
| P. trichocarpa_DUF | 158 |
| P. trichocarpa_MUB2 | 160 |
| T. officinale_TA3338_50225 | 156 |
| H. vulgare_TC163732 | 98 |
| T. aestivum_TC292522 | 152 |
| O. sativa_LOC_Os01g55190.1 | 116 |
| P. virgatum_TC7090 | 136 |
| S. bicolor_Sb03g034960.1 | 142 |
| officinarum_TC76182 | 148 |
| Z. mays_c62082358gm030403@7546 | 172 |
| Z. mays_ZM07MC26525_BFb0211C02@26447 | 176 |
| Zea_mays_GRMZM2G324705_T01 | 180 |
| Z. officinale_TA720_94328 | 178 |
| P. sitchensis_TA10533_3332 | 120 |
| P. taeda_TA4773_3352 | 126 |
| O. sativa_LOC_Os03g59300.1 | 118 |
| S. bicolor_Sb01g004270.1 | 140 |
| Z. mays_c57213778gm030403@389 | 170 |
| Z. mays_TC506958 | 174 |
| P. trichocarpa_735032 | 130 |
| V. vinifera_GSVIVT00025589001 | 166 |
| S. lycopersicum_TC198542 | 144 |
| Triphysaria_sp_TC11756 | 162 |
| G. max_Glyma09g36220.1 | 88 |
| M. truncatula_AC174305_19.4 | 110 |
| G. max_Glyma15g43180.1 | 90 |
| P. vulgaris_TC10932 | 138 |
| A. lyrata_478145 | 60 |
| A. thaliana_AT3G08030.1 | 70 |
| B. napus_TC89135 | 76 |
| G. hirsutum_TC161608 | 86 |
| T. cacao_TC4474 | 154 |
| L. serriola_TC5542 | 106 |
| C. sinensis_TC3550 | 80 |
| P. trichocarpa_549292 | 128 |
| P. trichocarpa_833200 | 132 |
| V. vinifera_GSVIVT00028751001 | 168 |
| F. vesca_TA10399_57918 | 82 |
| N. benthamiana_TC11106 | 112 |
| N. tabacum_TC43533 | 114 |
| S. lycopersicum_TC199778 | 146 |
| Triphysaria_sp_TC1599 | 164 |
| I. nil_TC4208 | 100 |

[0585] FIG. 4 represents a multiple alignment of a selection (clade A) of DUF642 polypeptides from FIG. 3. The corresponding SEQ ID NO's for the aligned polypeptide sequences shown in FIG. 4 are:

| Annotation | SEQ ID NO: |
|---|---|
| O. sativa_LOC_Os01g42520.1 | 6 |
| P. virgatum_TC46275 | 18 |
| S. bicolor_Sb03g027650.1 | 20 |
| Z. mays_TC458850 | 36 |
| Zea_mays_GRMZM2G034985_T02 | 42 |
| T. aestivum_c60008104@11410 | 34 |
| O. sativa_LOC_Os04g41710.1 | 8 |
| O. sativa_LOC_Os04g41740.1 | 10 |
| Os_DUF642.3 | 2 |
| O. sativa_LOC_Os04g41750.1 | 12 |
| SEQ ID NO: 24 for S. bicolor_Sb06g021280.1 | 24 |
| Z. mays_ZM07MC22756_BFb0088A01@22693 | 40 |
| Zea_mays_GRMZM2G051898_T01 | 44 |
| S. bicolor_Sb06g021290.1 | 26 |
| O. sativa_LOC_Os04g41759.1 | 14 |
| S. bicolor_Sb06g021320.1 | 32 |
| S. bicolor_Sb06g021300.1 | 28 |
| Z. mays_TC468877 | 38 |
| S. bicolor_Sb06g021310.1 | 30 |
| O. sativa_LOC_Os04g41770.1 | 16 |
| S. bicolor_Sb06g021270.1 | 22 |
| Zea_mays_GRMZM2G051912_T01 | 46 |
| Zea_mays_GRMZM2G405071_T01 | 48 |
| O. sativa_LOC_Os02g11040.1 | 50 |
| Os_DUF642.2 | 4 |
| P. virgatum_TC392 | 52 |
| S. bicolor_Sb04g007160.1 | 54 |
| Z. mays_TC467870 | 56 |

[0586] FIG. 5 shows a phylogenetic tree of DUF642 polypeptides, as described in Example 2. Clade A is encircled, the remainder of the branches of the tree are grouped in clade B.

[0587] FIG. 6 shows the MATGAT table of Example 3.

[0588] FIG. 7 represents the binary vector used for increased expression in Oryza sativa of a DUF642-encoding nucleic acid under the control of a rice GOS2 promoter (pGOS2).

[0589] FIG. 8 represents the domain structure of SEQ ID NO: 198 with conserved motifs.

[0590] FIG. 9 represents a multiple alignment of the epimerase-related like polypeptides as listed in table A. These alignments can be used for defining further motifs or signature sequences, when using conserved amino acids.

[0591] FIG. 10 shows phylogenetic tree of epimerase-related like polypeptides. To obtain the tree, protein sequences were aligned with MAFFT, a bootstrapped Neighbour Joining (NJ) tree was calculated with QuickTree (100 repeats, uncorrected), which was visualized with Dendroscope (for further details on the used techniques see example 2)

[0592] FIG. 11 shows the MATGAT table of Example 3.

[0593] FIG. 12 represents the binary vector used for increased expression in Oryza sativa of a nucleic acid encoding an epimerase-related like polypeptide under the control of a rice GOS2 promoter (pGOS2).

[0594] FIG. 13 represents the domain structure of SEQ ID NO: 285 with conserved motifs.

[0595] FIG. 14 shows phylogenetic tree of PLPCase polypeptides, showing three clusters.

[0596] FIG. 15 shows the MatGAT table of Example 3.

[0597] FIG. 16 represents the binary vector used for increased expression in Oryza sativa of a PLPCase-encoding nucleic acid under the control of a rice GOS2 promoter (pGOS2).

### EXAMPLES

[0598] The present invention will now be described with reference to the following examples, which are by way of illustration only. The following examples are not intended to limit the scope of the invention. Unless otherwise indicated, the present invention employs conventional techniques and methods of plant biology, molecular biology, bioinformatics and plant breedings.

[0599] DNA manipulation: unless otherwise stated, recombinant DNA techniques are performed according to standard protocols described in (Sambrook (2001) Molecular Cloning: a laboratory manual, 3rd Edition Cold Spring Harbor Laboratory Press, CSH, New York) or in Volumes 1 and 2 of Ausubel et al. (1994), Current Protocols in Molecular Biology, Current Protocols. Standard materials and methods for plant molecular work are described in Plant Molecular Biology Labfax (1993) by R. D. D. Croy, published by BIOS Scientific Publications Ltd (UK) and Blackwell Scientific Publications (UK).

### Example 1

### Identification of Sequences Related to the Nucleic Acid Sequence Used in the Methods of Intervention

### 1. DUF642 Polypeptides

[0600] Sequences (full length cDNA, ESTs or genomic) related to SEQ ID NO: 1 and SEQ ID NO: 2; and SEQ ID NO: 3 and SEQ ID NO: 4 were identified amongst those maintained in the Entrez Nucleotides database at the National Center for Biotechnology Information (NCBI) using database sequence search tools, such as the Basic Local Alignment Tool (BLAST) (Altschul et al. (1990) J. Mol. Biol. 215:403-410; and Altschul et al. (1997) Nucleic Acids Res. 25:3389-3402). The program is used to find regions of local similarity between sequences by comparing nucleic acid or polypeptide sequences to sequence databases and by calculating the statistical significance of matches. For example, the polypeptide encoded by the nucleic acid of SEQ ID NO: 1 was used for the TBLASTN algorithm, with default settings and the filter to ignore low complexity sequences set off. The output of the analysis was viewed by pairwise comparison, and ranked according to the probability score (E-value), where the score reflect the probability that a particular alignment occurs by chance (the lower the E-value, the more significant the hit). In addition to E-values, comparisons were also scored by percentage identity. Percentage identity refers to the number of identical nucleotides (or amino acids) between the two compared nucleic acid (or polypeptide) sequences over a particular length. In some instances, the default parameters may be adjusted to modify the stringency of the search. For example the E-value may be increased to show less stringent matches. This way, short nearly exact matches may be identified.

[0601] Table A1 provides a list of nucleic acid and protein sequences related to SEQ ID NO: 1, SEQ ID NO: 2, SEQ ID NO: 3 and SEQ ID NO: 4.

TABLE A1
Examples of DUF642 nucleic acids and polypeptides:

| | | Protein |
|---|---|---|
| | Nucleic acid | SEQ |
| Plant Source_name | SEQ ID NO: | ID NO: |
| O. sativa_DUF642.3 | 1 | 2 |
| O. sativa_DUF642.2 | 3 | 4 |
| O. sativa_LOC_Os01g42520.1 | 5 | 6 |
| O. sativa_LOC_Os04g41710.1 | 7 | 8 |
| O. sativa_LOC_Os04g41740.1 | 9 | 10 |
| O. sativa_LOC_Os04g41750.1 | 11 | 12 |
| O. sativa_LOC_Os04g41759.1 | 13 | 14 |
| O. sativa_LOC_Os04g41770.1 | 15 | 16 |
| P. virgatum_TC46275 | 17 | 18 |
| S. bicolor_Sb03g027650.1 | 19 | 20 |
| S. bicolor_Sb06g021270.1 | 21 | 22 |
| S. bicolor_Sb06g021280.1 | 23 | 24 |
| S. bicolor_Sb06g021290.1 | 25 | 26 |
| S. bicolor_Sb06g021300.1 | 27 | 28 |
| S. bicolor_Sb06g021310.1 | 29 | 30 |
| S. bicolor_Sb06g021320.1 | 31 | 32 |
| T. aestivum_c60008104@11410 | 33 | 34 |
| Z. mays_TC458850 | 35 | 36 |
| Z. mays_TC468877 | 37 | 38 |
| Z. mays_ZM07MC22756_BFb0088A01@22693 | 39 | 40 |
| Z. mays_GRMZM2G034985_T02 | 41 | 42 |
| Z. mays_GRMZM2G051898_T01 | 43 | 44 |
| Z. mays_GRMZM2G051912_T01 | 45 | 46 |
| Z. mays_GRMZM2G405071_T01 | 47 | 48 |
| O. sativa_LOC_Os02g11040.1 | 49 | 50 |
| P. virgatum_TC392 | 51 | 52 |
| S. bicolor_Sb04g007160.1 | 53 | 54 |
| Z. mays_TC467870 | 55 | 56 |
| A. lyrata_340195 | 57 | 58 |
| A. lyrata_478145 | 59 | 60 |
| A. lyrata_912808 | 61 | 62 |
| A. lyrata_934049 | 63 | 64 |
| A. thaliana_AT1G29980.1 | 65 | 66 |
| A. thaliana_AT1G80240.1 | 67 | 68 |
| A. thaliana_AT3G08030.1 | 69 | 70 |
| B. napus_TC65362 | 71 | 72 |
| B. napus_TC77368 | 73 | 74 |
| B. napus_TC89135 | 75 | 76 |
| C. annuum_TC19321 | 77 | 78 |
| C. sinensis_TC3550 | 79 | 80 |
| F. vesca_TA10399_57918 | 81 | 82 |
| G. hirsutum_TC135941 | 83 | 84 |
| G. hirsutum_TC161608 | 85 | 86 |
| G. max_Glyma09g36220.1 | 87 | 88 |
| G. max_Glyma15g43180.1 | 89 | 90 |
| G. max_GM06MC25068_saa05g06@24507 | 91 | 92 |
| G. max_TC286277 | 93 | 94 |
| G. raimondii_TC1124 | 95 | 96 |
| H. vulgare_TC163732 | 97 | 98 |
| I. nil_TC4208 | 99 | 100 |
| J. hindsii_x_regia_TA1156_432290 | 101 | 102 |
| L. japonicus_TC41787 | 103 | 104 |
| L. serriola_TC5542 | 105 | 106 |
| M. domestica_TC32901 | 107 | 108 |
| M. truncatula_AC174305_19.4 | 109 | 110 |
| N. benthamiana_TC11106 | 111 | 112 |
| N. tabacum_TC43533 | 113 | 114 |
| O. sativa_LOC_Os01g55190.1 | 115 | 116 |
| O. sativa_LOC_Os03g59300.1 | 117 | 118 |
| P. sitchensis_TA10533_3332 | 119 | 120 |
| P. sitchensis_TA14284_3332 | 121 | 122 |
| P. taeda_TA10429_3352 | 123 | 124 |
| P. taeda_TA4773_3352 | 125 | 126 |
| P. trichocarpa_549292 | 127 | 128 |
| P. trichocarpa_735032 | 129 | 130 |
| P. trichocarpa_833200 | 131 | 132 |
| P. trifoliata_TA6477_37690 | 133 | 134 |
| P. virgatum_TC7090 | 135 | 136 |
| P. vulgaris_TC10932 | 137 | 138 |
| S. bicolor_Sb01g004270.1 | 139 | 140 |
| S. bicolor_Sb03g034960.1 | 141 | 142 |
| S. lycopersicum_TC198542 | 143 | 144 |
| S. lycopersicum_TC199778 | 145 | 146 |
| S. officinarum_TC76182 | 147 | 148 |
| S. tuberosum_TC189725 | 149 | 150 |
| T. aestivum_TC292522 | 151 | 152 |
| T. cacao_TC4474 | 153 | 154 |
| T. officinale_TA3338_50225 | 155 | 156 |
| P. trichocarpa_DUF | 157 | 158 |
| P. trichocarpa PP_MUB2 | 159 | 160 |
| Triphysaria_sp_TC11756 | 161 | 162 |
| Triphysaria_sp_TC1599 | 163 | 164 |
| V. vinifera_GSVIVT00025589001 | 165 | 166 |
| V. vinifera_GSVIVT00028751001 | 167 | 168 |
| Z. mays_c57213778gm030403@389 | 169 | 170 |
| Z. mays_c62082358gm030403@7546 | 171 | 172 |
| Z. mays_TC506958 | 173 | 174 |
| Z. mays_ZM07MC26525_BFb0211C02@26447 | 175 | 176 |
| Z. officinale_TA720_94328 | 177 | 178 |
| Z. mays_GRMZM2G324705_T01 | 179 | 180 |

### 2. Epimerase-Related Like Polypeptides

[0602] Sequences (full length cDNA, ESTs or genomic) related to SEQ ID NO: 197 and SEQ ID NO: 198 were identified amongst those maintained in the Entrez Nucleotides database at the National Center for Biotechnology Information (NCBI) using database sequence search tools, such as the Basic Local Alignment Tool (BLAST) (Altschul et al. (1990) J. Mol. Biol. 215:403-410; and Altschul et al. (1997) Nucleic Acids Res. 25:3389-3402). The program is used to find regions of local similarity between sequences by comparing nucleic acid or polypeptide sequences to sequence databases and by calculating the statistical significance of matches. For example, the polypeptide encoded by the nucleic acid of SEQ ID NO: 197 was used for the TBLASTN algorithm, with default settings and the filter to ignore low complexity sequences set off. The output of the analysis was viewed by pairwise comparison, and ranked according to the probability score (E-value), where the score reflect the probability that a particular alignment occurs by chance (the lower the E-value, the more significant the hit). In addition to E-values, comparisons were also scored by percentage identity. Percentage identity refers to the number of identical nucleotides (or amino acids) between the two compared nucleic acid (or polypeptide) sequences over a particular length. In some instances, the default parameters may be adjusted to modify the stringency of the search. For example the E-value may be increased to show less stringent matches. This way, short nearly exact matches may be identified.

[0603] Table A2 provides SEQ ID NO: 197 and SEQ ID NO: 198. and a list of nucleic acid and protein sequences related to SEQ ID NO: 197 and SEQ ID NO: 198.

TABLE A2
Examples of an epimerase-related like nucleic acids and polypeptides:

| | SEQ | |
|---|---|---|
| | ID NO: | SEQ ID NO: |
| Plant Source | protein | nucleic acid |
| Poptr_epimerase-related | 198 | 197 |
| Z. mays_ZM07MC24472_BFb0052A17@24402 | 200 | 199 |
| A. lyrata_486720 | 202 | 201 |
| A. lyrata_489502 | 204 | 203 |
| A. thaliana_AT3G62130.1 | 206 | 205 |
| A. thaliana_AT5G26600.1 | 208 | 207 |
| Aquilegia_sp_TC26581 | 210 | 209 |
| B. napus_TC63646 | 212 | 211 |
| C. clementina_TC23968 | 214 | 213 |
| C. sinensis_TC2568 | 216 | 215 |
| G. hirsutum_TC132670 | 218 | 217 |
| G. max_Glyma02g01070.1 | 220 | 219 |
| G. max_Glyma03g38740.1 | 222 | 221 |
| G. max_Glyma19g41330.1 | 224 | 223 |
| G. max_Glyma20g22430.1 | 226 | 225 |
| H. vulgare_TC158694 | 228 | 227 |
| M. truncatula_AC151948_16.5 | 230 | 229 |
| M. truncatula_AC166315_9.4 | 232 | 231 |
| O. sativa_LOC_Os01g18640.1 | 234 | 233 |
| O. sativa_LOC_Os01g18660.1 | 236 | 235 |
| P. patens_175806 | 238 | 237 |
| P. patens_TC39863 | 240 | 239 |
| P. persica_TC12771 | 242 | 241 |
| P. trichocarpa_570656 | 244 | 243 |
| P. trichocarpa_572528 | 246 | 245 |
| S. bicolor_Sb03g011840.1 | 248 | 247 |
| S. bicolor_Sb03g011840.2 | 250 | 249 |
| S. bicolor_Sb03g011840.3 | 252 | 251 |
| S. bicolor_Sb03g011850.1 | 254 | 253 |
| S. lycopersicum_TC191918 | 256 | 255 |
| S. moellendorffii_232064 | 258 | 257 |
| S. moellendorffii_413706 | 260 | 259 |
| S. tuberosum_TC167698 | 262 | 261 |
| T. aestivum_TC278728 | 264 | 263 |
| V. vinifera_GSVIVT00028240001 | 266 | 265 |
| Z. mays_TC513613 | 268 | 267 |
| Zea_mays_GRMZM2G077212_T01 | 270 | 269 |
| Zea_mays_GRMZM2G322186_T01 | 272 | 271 |

### 3. PLPCase Polypeptides

[0604] Sequences (full length cDNA, ESTs or genomic) related to SEQ ID NO: 284 and SEQ ID NO: 285 were identified amongst those maintained in the Entrez Nucleotides database at the National Center for Biotechnology Information (NCBI) using database sequence search tools, such as the Basic Local Alignment Tool (BLAST) (Altschul et al. (1990) J. Mol. Biol. 215:403-410; and Altschul et al. (1997) Nucleic Acids Res. 25:3389-3402). The program is used to find regions of local similarity between sequences by comparing nucleic acid or polypeptide sequences to sequence databases and by calculating the statistical significance of matches. For example, the polypeptide encoded by the nucleic acid of SEQ ID NO: 284 was used for the TBLASTN algorithm, with default settings and the filter to ignore low complexity sequences set off. The output of the analysis was viewed by pairwise comparison, and ranked according to the probability score (E-value), where the score reflect the probability that a particular alignment occurs by chance (the lower the E-value, the more significant the hit). In addition to E-values, comparisons were also scored by percentage identity. Percentage identity refers to the number of identical nucleotides (or amino acids) between the two compared nucleic acid (or polypeptide) sequences over a particular length. In some instances, the default parameters may be adjusted to modify the stringency of the search. For example the E-value may be increased to show less stringent matches. This way, short nearly exact matches may be identified.

[0605] Table A3 provides a list of nucleic acid and protein sequences related to SEQ ID NO: 284 and SEQ ID NO: 285.

TABLE A3
Examples of PLPCase nucleic acids and polypeptides:

| | Nucleic | |
|---|---|---|
| | acid | Protein |
| | SEQ | SEQ |
| Plant Source | ID NO: | ID NO: |
| M. truncatula_PLPCase | 284 | 285 |
| A. thaliana_AT3G15650.1#1 | 286 | 287 |
| A. thaliana_AT1G52470.1#1 | 288 | 289 |
| G. max_Glyma13g43990.1#1 | 290 | 291 |
| G. max_Glyma08g22420.1#1 | 292 | 293 |
| G. max_Glyma07g03670.1#1 | 294 | 295 |
| A. thaliana_AT1G52700.1#1 | 296 | 297 |
| G. max_GM06MC00001_45093526@1#1 | 298 | 299 |
| P. trichocarpa_TC89207#1 | 300 | 301 |
| T. aestivum_c55164328@10990#1 | 302 | 303 |
| Z. mays_c58236581gm030403@14151#1 | 304 | 305 |
| H. vulgare_BI948365#1 | 306 | 307 |
| H. annuus_TC40709#1 | 308 | 309 |
| B. napus_TC92944#1 | 310 | 311 |
| B. napus_BN06MC12702_43481925@12666#1 | 312 | 313 |
| A. thaliana_AT5G20060.1#1 | 314 | 315 |
| B. napus_BN06MC00524_46010623@523#1 | 316 | 317 |
| H. annuus_TC45565#1 | 318 | 319 |
| M. truncatula_AC148176_15.5#1 | 320 | 321 |
| O. sativa_LOC_Os01g07960.1#1 | 322 | 323 |
| Z. mays_TC480822#1 | 324 | 325 |
| P. trichocarpa_scaff_VI.1824#1 | 326 | 327 |
| P. trichocarpa_809106#1 | 328 | 329 |
| G. max_TC317555#1 | 330 | 331 |
| G. max_Glyma04g07280.1#1 | 332 | 333 |
| Z. mays_TC563901#1 | 334 | 335 |
| Z. mays_ZM07MC31087_BFb0267E17@30994#1 | 336 | 337 |
| T. aestivum_TC296583#1 | 338 | 339 |
| Zea_mays_GRMZM2G481362_T01#1 | 340 | 341 |
| O. sativa_LOC_Os01g42690.1#1 | 342 | 343 |
| O. sativa_LOC_Os05g51050.1#1 | 344 | 345 |
| Z. mays_ZM07MC23122_BFb0221H24@23057#1 | 346 | 347 |

[0606] Sequences have been tentatively assembled and publicly disclosed by research institutions, such as The Institute for Genomic Research (TIGR; beginning with TA). For instance, the Eukaryotic Gene Orthologs (EGO) database may be used to identify such related sequences, either by keyword search or by using the BLAST algorithm with the nucleic acid sequence or polypeptide sequence of interest. Special nucleic acid sequence databases have been created for particular organisms, e.g. for certain prokaryotic organisms, such as by the Joint Genome Institute. Furthermore, access to proprietary databases, has allowed the identification of novel nucleic acid and polypeptide sequences.

### Example 2

### Alignment of Sequences to the Polypeptide Sequences Used in the Methods of the Invention

### 1. DUF642 Polypeptides

[0607] Alignment of polypeptide sequences was performed using the AlignX alignment of Vector NTI, Invitrogen, 10.3 (2006) with gap opening penalty of 10.0, gap extension penalty of 0.05 and gap separation penalty range 8. The DUF642 polypeptides are aligned in FIG. 2, showing DUF642 polypeptides of clades A and B. FIG. 3 shows an alignment of the DUF642 polypeptides of clade A (as shown in FIG. 5).

[0608] A phylogenetic tree of DUF642 polypeptides (FIG. 5) was constructed by aligning DUF642 sequences using MAFFT (Katoh and Toh (2008)—Briefings in Bioinformatics 9:286-298). A neighbour-joining tree was calculated using Quick-Tree (Howe et al. (2002), Bioinformatics 18(11): 1546-7), 100 bootstrap repetitions. The dendrogram was drawn using Dendroscope (Huson et al. (2007), BMC Bioinformatics 8(1):460). Confidence levels for 100 bootstrap repetitions are indicated for major branchings.

### 2. Epimerase-Related Like Polypeptides

[0609] Alignment of polypeptide sequences was performed using MAFFT (version 6.624, L-INS-I method—Katoh and Toh (2008)—Briefings in Bioinformatics 9:286-298). Minor manual editing was done to further optimize the alignment. A representative number of epimerase-related like polypeptides are aligned in FIG. 9.

[0610] A phylogenetic tree of epimerase-related like polypeptides (FIG. 10) was constructed by aligning epimerase-related like sequences using MAFFT (Katoh and Toh (2008)—Briefings in Bioinformatics 9:286-298). A neighbour-joining tree was calculated using Quick-Tree (Howe et al. (2002), Bioinformatics 18(11): 1546-7), 100 bootstrap repetitions. The dendrogram was drawn using Dendroscope (Huson et al. (2007), BMC Bioinformatics 8(1):460). Confidence levels for 100 bootstrap repetitions are indicated for major branchings.

### 3. PLPCase Polypeptides

[0611] Alignment of polypeptide sequences is performed using the ClustalW 2.0 algorithm of progressive alignment (Thompson et al. (1997) Nucleic Acids Res 25:4876-4882; Chema et al. (2003). Nucleic Acids Res 31:3497-3500) with standard setting (slow alignment, similarity matrix: Gonnet, gap opening penalty 10, gap extension penalty: 0.2). Minor manual editing was done to further optimise the alignment.

[0612] A phylogenetic tree of PLPCase polypeptides (FIG. 14) was constructed by aligning PLPCase sequences using MAFFT (Katoh and Toh (2008)—Briefings in Bioinformatics 9:286-298). A neighbour-joining tree was calculated using Quick-Tree (Howe et al. (2002), Bioinformatics 18(11): 1546-7), 100 bootstrap repetitions. A circular dendrogram was drawn using Dendroscope 2.0.1 (Huson et al. (2007), BMC Bioinformatics 8(1):460). Confidence levels for 100 bootstrap repetitions are indicated for major branchings.

### Example 3

### Calculation of Global Percentage Identity Between Polypeptide Sequences

[0613] Global percentages of similarity and identity between full length polypeptide sequences useful in performing the methods of the invention were determined using MatGAT (Matrix Global Alignment Tool) software (BMC Bioinformatics. 2003 4:29. MatGAT: an application that generates similarity/identity matrices using protein or DNA sequences. Campanella J J, Bitincka L, Smalley J; software hosted by Ledion Bitincka). MatGAT generates similarity/identity matrices for DNA or protein sequences without needing pre-alignment of the data. The program performs a series of pair-wise alignments using the Myers and Miller global alignment algorithm, calculates similarity and identity, and then places the results in a distance matrix.

### 1. DUF642 Polypeptides

[0614] Results of an analysis for clade A are shown in FIG. 6 for the global similarity and identity over the full length of the polypeptide sequences. Sequence similarity is shown in the bottom half of the dividing line and sequence identity is shown in the top half of the diagonal dividing line. Parameters used in the comparison were: Scoring matrix: Blosum62, First Gap: 12, Extending Gap: 2. The sequence identity (in %) between the DUF642 polypeptide sequences of clade A+B useful in performing the methods of the invention can be as low as 29.7% (is generally higher than 29.7%) compared to SEQ ID NO: 2 or 4. The sequence identity (in %) between the DUF642 polypeptide sequences of clade A useful in performing the methods of the invention can be as low as 38.4% (is generally higher than 38.4%) compared to SEQ ID NO: 2 or 4.

TABLE B1
Description of proteins in FIG. 6:

```
  1. Os_DUF642.3
  2. Os_DUF642.2
  3. O. sativa_LOC_Os01g42520.1
  4. O. sativa_LOC_Os04g41710.1
  5. O. sativa_LOC_Os04g41740.1
  6. O. sativa_LOC_Os04g41750.1
  7. O. sativa_LOC_Os04g41759.1
  8. O. sativa_LOC_Os04g41770.1
  9. P. virgatum_TC46275
10. S. bicolor_Sb03g027650.1
11. S. bicolor_Sb06g021270.1
12. S. bicolor_Sb06g021280.1
13. S. bicolor_Sb06g021290.1
14. S. bicolor_Sb06g021300.1
15. S. bicolor_Sb06g021310.1
16. S. bicolor_Sb06g021320.1
17. T. aestivum_c60008104@11410
18. Z. mays_TC458850
19. Z. mays_TC468877
20. Z. mays_ZM07MC22756_BFb0088A01@22693
21. Zea_mays_GRMZM2G034985_T02
22. Zea_mays_GRMZM2G051898_T01
23. Zea_mays_GRMZM2G051912_T01
24. Zea_mays_GRMZM2G405071_T01
25. O. sativa_LOC_Os02g11040.1
26. P. virgatum_TC392
27. S. bicolor_Sb04g007160.1
28. Z. mays_TC467870
```

### 2. Epimerase-Related Like Polypeptides

[0615] Results of the analysis are shown in FIG. 11 for the global similarity and identity over the full length of the polypeptide sequences. Sequence similarity is shown in the bottom half of the dividing line and sequence identity is shown in the top half of the diagonal dividing line. Parameters used in the comparison were: Scoring matrix: Blosum62, First Gap: 12, Extending Gap: 2. The sequence identity (in %) between the epimerase-related like polypeptide sequences useful in performing the methods of the invention is generally higher than 40% compared to SEQ ID NO: 198.

[0616] A MATGAT table for local alignment of a specific domain, or data on % identity/similarity between specific domains can also be made.

### 3. PLPCase Polypeptides

[0617] Results of the analysis are shown in FIG. 15 for the global similarity and identity over the full length of the polypeptide sequences. Sequence similarity is shown in the bottom half of the dividing line and sequence identity is shown in the top half of the diagonal dividing line. Parameters used in the comparison were: Scoring matrix: Blosum62, First Gap: 12, Extending Gap: 2. The sequence identity (in %) between the PLPCase polypeptide sequences useful in performing the methods of the invention can be as low as 24%, but is generally higher than 24%, compared to SEQ ID NO: 285.

TABLE B2
Description of proteins in FIG. 15:

```
  1. M. truncatula_PLPCase
  2. A. thaliana_AT3G15650.1#1
  3. A. thaliana_AT1G52470.1#1
  4. G. max_Glyma13g43990.1#1
  5. G. max_Glyma08g22420.1#1
  6. G. max_Glyma07g03670.1#1
  7. A. thaliana_AT1G52700.1#1
  8. G. max_GM06MC00001_45093526@1#1
  9. P. trichocarpa_TC89207#1
10. T. aestivum_c55164328@10990#1
11. Z. mays_c58236581gm030403@14151#1
12. H. vulgare_BI948365#1
13. H. annuus_TC40709#1
14. B. napus_TC92944#1
15. B. napus_BN06MC12702_43481925@12666#1
16. A. thaliana_AT5G20060.1#1
17. B. napus_BN06MC00524_46010623@523#1
18. H. annuus_TC45565#1
19. M. truncatula_AC148176_15.5#1
20. O. sativa_LOC_Os01g07960.1#1
21. Z. mays_TC480822#1
22. P. trichocarpa_scaff_VI.1824#1
23. P. trichocarpa_809106#1
24. G. max_TC317555#1
25. G. max_Glyma04g07280.1#1
26. Z. mays_TC563901#1
27. Z. mays_ZM07MC31087_BFb0267E17@30994#1
28. T. aestivum_TC296583#1
29. Zea_mays_GRMZM2G481362_T01#1
30. O. sativa_LOC_Os01g42690.1#1
31. O. sativa_LOC_Os05g51050.1#1
32. Z. mays_ZM07MC23122_BFb0221H24@23057#1
```

[0618] As can be seen from the MatGAT table in FIG. 15, PLPCase can be separated into three clusters: Cluster A: containing PLPCase of dicot origin, Cluster B: containing PLPCase of dicot and monocot origin and Cluster C: containing PLPCase of monocot origin.

### Example 4

### Identification of Domains Comprised in Polypeptide Sequences Useful in Performing the Methods of the Invention

[0619] The Integrated Resource of Protein Families, Domains and Sites (InterPro) database is an integrated interface for the commonly used signature databases for text- and sequence-based searches. The InterPro database combines these databases, which use different methodologies and varying degrees of biological information about well-characterized proteins to derive protein signatures. Collaborating databases include SWISS-PROT, PROSITE, TrEMBL, PRINTS, Propom and Pfam, Smart and TIGRFAMs. Pfam is a large collection of multiple sequence alignments and hidden Markov models covering many common protein domains and families. Pfam is hosted at the Sanger Institute server in the United Kingdom. Interpro is hosted at the European Bioinformatics Institute in the United Kingdom.

### 1. DUF642 Polypeptides

[0620] The results of the InterPro scan (InterPro database, release 4.7) of the polypeptide sequence as represented by SEQ ID NO: 2 and 4, respectively, are presented in Table C1.

TABLE C1
InterPro scan results (major accession numbers) of the polypeptide
sequence as represented by SEQ ID NO: 2 and 4.

| | | | Amino acid | Amino acid |
|---|---|---|---|---|
| | | Domain | coordinates on | coordinates on |
| Interpro ID | Domain ID | name | SEQ ID NO 2 | SEQ ID NO 4 |
| IPR006946 | PF04862 | DUF642 | 51-371 | 1-292 |

[0621] In an embodiment a DUF642 polypeptide comprises a conserved domain (or motif) with at least 70%, 71%, 72%, 73%, 74%, 75%, 76%, 77%, 78%, 79%, 80%, 81%, 82%, 83%, 84%, 85%, 86%, 87%, 88%, 89%, 90%, 91%, 92%, 93%, 94%, 95%, 96%, 97%, 98%, or 99% sequence identity to a conserved domain from amino acid 51 to 371 in SEQ ID NO:2 or from amino acid 28 to 194 of SEQ ID NO: 4.

### 2. Epimerase-Related Like Polypeptides

[0622] The results of the InterPro scan (InterPro database, release 30.0) of the polypeptide sequence as represented by SEQ ID NO: 198 are presented in Table C2.

TABLE C2
InterPro scan results (major accession numbers) of the polypeptide sequence as represented by SEQ ID NO: 198.

| | | | Amino acid coordinates | | |
|---|---|---|---|---|---|
| Database | Accession number | Accession name | on SEQ ID NO: 198 | E-value | accession |
| superfamily | SSF53383 | PyrdxIP-dep_Trfase_major | [32-449] | 1.2E−55 | IPR015424 |
| | | (Pyridoxal phosphate-dependent | | | |
| | | transferase, major domain) | | | |
| HMMPanther | PTHR11601 | PTHR11601 | [47-276] | 7.89E−15 | NULL |
| HMMPfam | PF00266 | Aminotran_5 | [92-364] | 6.7E−18 | IPR000192 |
| | | (Aminotransferase, class V/Cysteine | | | |
| | | desulfurase Biological Process: | | | |
| | | metabolic process (GO: 0008152)) | | | |
| Gene3D | G3DSA: 3.40.640.10 | PyrdxIP-dep_Trfase_major_sub1 | [59-323] | 1.09E−42 | IPR015421 |
| | | (Pyridoxal phosphate-dependent | | | |
| | | transferase, major region, | | | |
| | | subdomain 1) | | | |

[0623] An epimerase-related like polypeptide according to the invention comprises a conserved domain (or motif) with at least 50%, 51%, 52%, 53%, 54%, 55%, 56%, 57%, 58%, 59%, 60%, 61%, 62%, 63%, 64%, 65%, 66%, 67%, 68%, 69%, 70%, 71%, 72%, 73%, 74%, 75%, 76%, 77%, 78%, 79%, 80%, 81%, 82%, 83%, 84%, 85%, 86%, 87%, 88%, 89%, 90%, 91%, 92%, 93%, 94%, 95%, 96%, 97%, 98%, 99% sequence identity to or consists of a conserved domain selected from any one of:
[0624] amino acid coordinates 32 to 449 in SEQ ID NO: 198;
[0625] amino acid coordinates 47 to 276 in SEQ ID NO: 198;
[0626] amino acid coordinates 92 to 364 in SEQ ID NO: 198; and
[0627] amino acid coordinates 59 to 323 in SEQ ID NO: 198.

### 3. PLPCase Polypeptides

[0628] The results of the InterPro scan (InterPro database, version 4.6) of the polypeptide sequence as represented by SEQ ID NO: 285 are presented in Table C3.

TABLE C3
InterPro scan results (major accession numbers) of the polypeptide sequence as
represented by SEQ ID NO: 285.

| | | | e-value [Amino acid |
|---|---|---|---|
| | | Domain name | coordinates |
| Database | Accession number | Short name | on SEQ ID NO 285] |
| IPR003140 | PF02230 | Phospholipase/carboxylesterase | 6.2e−41 [24-248]T |
| InterPro | PFAM | Abhydrolase_2 | |
| Unintegrated | G3DSA: 3.40.50.1820 | Unintegrated | 5.3e−56 [12-250]T |
| | GENE3D | NA | |
| | PTHR10655 | Unintegrated | 1.3e−94 [60-254]T |
| | PANTHER | LYSOPHOSPHOLIPASE-RELATED | |
| | PTHR10655: SF5 | Unintegrated | 1.3e−94 [60-254]T |
| | PANTHER | LYSOPHOSPHOLIPASE-RELATED | |
| | SSF53474 | Unintegrated | 2e−42 [21-251]T |
| | SUPERFAMILY | alpha/beta-Hydrolases | |

[0629] In an embodiment a PLPCase polypeptide comprises a conserved domain or motif with at least 70%, 71%, 72%, 73%, 74%, 75%, 76%, 77%, 78%, 79%, 80%, 81%, 82%, 83%, 84%, 85%, 86%, 87%, 88%, 89%, 90%, 91%, 92%, 93%, 94%, 95%, 96%, 97%, 98%, or 99% sequence identity to a conserved domain from amino acid 24 to 248 in SEQ ID NO: 285.

### Example 5

### Topology Prediction of the Polypeptide Sequences Useful in Performing the Methods of Invention

[0630] TargetP 1.1 predicts the subcellular location of eukaryotic proteins. The location assignment is based on the predicted presence of any of the N-terminal pre-sequences: chloroplast transit peptide (cTP), mitochondrial targeting peptide (mTP) or secretory pathway signal peptide (SP). Scores on which the final prediction is based are not really probabilities, and they do not necessarily add to one. However, the location with the highest score is the most likely according to TargetP, and the relationship between the scores (the reliability class) may be an indication of how certain the prediction is. The reliability class (RC) ranges from 1 to 5, where 1 indicates the strongest prediction. For the sequences predicted to contain an N-terminal presequence a potential cleavage site can also be predicted. TargetP is maintained at the server of the Technical University of Denmark.

[0631] A number of parameters must be selected before analysing a sequence, such as organism group (non-plant or plant), cutoff sets (none, predefined set of cutoffs, or user-specified set of cutoffs), and the calculation of prediction of cleavage sites (yes or no).

[0632] Many other algorithms can be used to perform such analyses, including:
[0633] ChloroP 1.1 hosted on the server of the Technical University of Denmark;
[0634] Protein Prowler Subcellular Localisation Predictor version 1.2 hosted on the server of the Institute for Molecular Bioscience, University of Queensland, Brisbane, Australia;
[0635] PENCE Proteome Analyst PA-GOSUB 2.5 hosted on the server of the University of Alberta, Edmonton, Alberta, Canada;
[0636] TMHMM, hosted on the server of the Technical University of Denmark
[0637] PSORT (URL: psort.org)
[0638] PLOC (Park and Kanehisa, Bioinformatics, 19, 1656-1663, 2003).

### Example 6

### Cloning of the Nucleic Acid Sequence Used in Methods of the Invention

### 1. DUF642 Polypeptides

[0639] The nucleic acid sequence was amplified by PCR using as template a custom-made Oryza sativa seedlings cDNA library. PCR was performed using a commercially available proofreading Taq DNA polymerase in standard conditions, using 200 ng of template in a 50 μl PCR mix.

[0640] In a first experiment A, the primers used were prm16414 (SEQ ID NO: 190; sense): 5′-ggggacaagtttgtacaaaaaagcaggcttaaacaatgagaagaaaaacagagatg-3′ and prm16415 (SEQ ID NO: 191; reverse, complementary): 5′-ggggaccactttgtacaagaaagctgggtataatattacagaaggaaccg-3′, which include the AttB sites for Gateway recombination.

[0641] In a second experiment B, the primers used were prm16412 (SEQ ID NO: 192; sense): 5′-ggggacaagtttgtacaaaaaagcaggcttaaacaatggtgctggtggtccc-3′ and prm16413 (SEQ ID NO: 193; reverse, complementary): 5′-ggggaccactttgtacaagaaagctgggttagtacgacatcgcggca-3′, which include the AttB sites for Gateway recombination.

[0642] The amplified PCR fragment was purified also using standard methods. The first step of the Gateway procedure, the BP reaction, was then performed, during which the PCR fragment recombined in vivo with the pDONR201 plasmid to produce, according to the Gateway terminology, an “entry clone”, pDUF642. Plasmid pDONR201 was purchased from Invitrogen, as part of the Gateway® technology.

[0643] In the first experiment A, the entry clone comprising SEQ ID NO: 1 was then used in an LR reaction with a destination vector used for Oryza sativa transformation. This vector contained as functional elements within the T-DNA borders: a plant selectable marker; a screenable marker expression cassette; and a Gateway cassette intended for LR in vivo recombination with the nucleic acid sequence of interest already cloned in the entry clone. A rice GOS2 promoter (SEQ ID NO: 189) for constitutive expression was located upstream of this Gateway cassette.

[0644] In the second experiment B, the entry clone comprising SEQ ID NO: 3 was then used in an LR reaction with a destination vector used for Oryza sativa transformation. This vector contained as functional elements within the T-DNA borders: a plant selectable marker; a screenable marker expression cassette; and a Gateway cassette intended for LR in vivo recombination with the nucleic acid sequence of interest already cloned in the entry clone. A rice GOS2 promoter (SEQ ID NO: 189) for constitutive expression was located upstream of this Gateway cassette.

[0645] In a further experiment, all steps as described above were executed for the cloning of SEQ ID NO: 159. Primers used were prm13182 (SEQ ID NO: 195; sense): 5′-ggggacaagtttgtacaaaaaagcaggcttaaacaatgtttcaaagct caacaaga-3′ and prm13183 (SEQ ID NO: 196; reverse, complementary): 5′-ggggaccactttgta caagaaagctgggtctctttctccccattcaaac 3′, which include the AttB sites for Gateway recombination.

[0646] The entry clone comprising SEQ ID NO: 159 was then used in an LR reaction with a destination vector used for Oryza sativa transformation. This vector contained as functional elements within the T-DNA borders: a plant selectable marker; a screenable marker expression cassette; and a Gateway cassette intended for LR in vivo recombination with the nucleic acid sequence of interest already cloned in the entry clone. A rice GOS2 promoter (SEQ ID NO: 189) for constitutive expression was located upstream of this Gateway cassette.

[0647] After the LR recombination step, the resulting expression vectors pGOS2::DUF642 (FIG. 7) were transformed into Agrobacterium strain LBA4044 according to methods well known in the art.

### 2. Epimerase-Related Like Polypeptides

[0648] The nucleic acid sequence was amplified by PCR using as template a custom-made Populus trichocarpa seedlings cDNA library. PCR was performed using a commercially available proofreading Taq DNA polymerase in standard conditions, using 200 ng of template in a 50 μl PCR mix. The primers used were prm18733 (SEQ ID NO: 276; sense, start codon in bold): 5′ ggggacaagtttgtacaaaaaagcaggcttaaacaatgcaagaaaactccaaagat 3′ and prm18734 (SEQ ID NO: 277; reverse, complementary): 5′ ggggaccactttgtacaagaaagctg ggtgcataccttctcactctggat 3′, which include the AttB sites for Gateway recombination. The amplified PCR fragment was purified also using standard methods. The first step of the Gateway procedure, the BP reaction, was then performed, during which the PCR fragment recombined in vivo with the pDONR201 plasmid to produce, according to the Gateway terminology, an “entry clone”, pERL (“ERL” stands for “epimerase-related like”). Plasmid pDONR201 was purchased from Invitrogen, as part of the Gateway® technology.

[0649] The entry clone comprising SEQ ID NO: 197 was then used in an LR reaction with a destination vector used for Oryza sativa transformation. This vector contained as functional elements within the T-DNA borders: a plant selectable marker; a screenable marker expression cassette; and a Gateway cassette intended for LR in vivo recombination with the nucleic acid sequence of interest already cloned in the entry clone. A rice GOS2 promoter (SEQ ID NO: 278) for constitutive expression was located upstream of this Gateway cassette.

[0650] After the LR recombination step, the resulting expression vector pGOS2::ERL (FIG. 12) was transformed into Agrobacterium strain LBA4044 according to methods well known in the art.

### 3. PLPCase Polypeptides

[0651] The nucleic acid sequence was amplified by PCR using as template a custom-made Medicago truncatula seedlings cDNA library. PCR was performed using a commercially available proofreading Taq DNA polymerase in standard conditions, using 200 ng of template in a 50 μl PCR mix. The primers used were prm15409 (SEQ ID NO: 362; sense, start codon in bold): 5′-ggggacaagtttgtacaaaaaagcaggcttaaacaatgagtcacgcgcattctc-3′ and prm15410 (SEQ ID NO: 363; reverse, complementary): 5′-ggggaccactttgtacaagaaa gctgggtaa aatagttttgtcatttacgacg-3′, which include the AttB sites for Gateway recombination. The amplified PCR fragment was purified also using standard methods. The first step of the Gateway procedure, the BP reaction, was then performed, during which the PCR fragment recombined in vivo with the pDONR201 plasmid to produce, according to the Gateway terminology, an “entry clone”, pPLPCase. Plasmid pDONR201 was purchased from Invitrogen, as part of the Gateway® technology.

[0652] The entry clone comprising SEQ ID NO: 284 was then used in an LR reaction with a destination vector used for Oryza sativa transformation. This vector contained as functional elements within the T-DNA borders: a plant selectable marker; a screenable marker expression cassette; and a Gateway cassette intended for LR in vivo recombination with the nucleic acid sequence of interest already cloned in the entry clone. A rice GOS2 promoter (SEQ ID NO: 361) for constitutive expression was located upstream of this Gateway cassette.

[0653] After the LR recombination step, the resulting expression vector pGOS2:: PLPCase (FIG. 16) was transformed into Agrobacterium strain LBA4044 according to methods well known in the art.

[0654] In the same way an expression vector comprising SEQ ID NO: 286 was prepared using primers prm15411 (SEQ ID NO: 364, sense): 5′-ggggacaagtttgtacaaaaaagcaggcttaaacaa tgagctattctcgtcaaagc-3′ and prm15412 (SEQ ID NO: 365; reverse, complementary): 5′-ggggaccactttgtacaagaaagctgggttgctgagaagatgcttgtaaa-3′.

### Example 7

### Plant Transformation

### Rice Transformation

[0655] The Agrobacterium containing the expression vector was used to transform Oryza sativa plants. Mature dry seeds of the rice japonica cultivar Nipponbare were dehusked. Sterilization was carried out by incubating for one minute in 70% ethanol, followed by 30 to 60 minutes, preferably 30 minutes in sodium hypochlorite solution (depending on the grade of contamination), followed by a 3 to 6 times, preferably 4 time wash with sterile distilled water. The sterile seeds were then germinated on a medium containing 2,4-D (callus induction medium). After incubation in light for 6 days scutellum-derived calli is transformed with Agrobacterium as described herein below. Alternatively, the incubation step in ethanol was followed by a 30 minutes incubation in 0.2% HgCl₂, followed by a 6 times 15 minutes wash with sterile distilled water. The sterile seeds were then germinated on a medium containing 2,4-D (callus induction medium). After incubation in the dark for four weeks, embryogenic, scutellum-derived calli were excised and propagated on the same medium. After two weeks, the calli were multiplied or propagated by subculture on the same medium for another 2 weeks. Embryogenic callus pieces were sub-cultured on fresh medium 3 days before co-cultivation (to boost cell division activity).

[0656] Agrobacterium strain LBA4404 containing the expression vector was used for co-cultivation. Agrobacterium was inoculated on AB medium with the appropriate antibiotics and cultured for 3 days at 28° C. The bacteria were then collected and suspended in liquid co-cultivation medium to a density (OD₆₀₀) of about 1. The calli were immersed in the suspension for 1 to 15 minutes. The callus tissues were then blotted dry on a filter paper and transferred to solidified, co-cultivation medium and incubated for 3 days in the dark at 25° C. After washing away the Agrobacterium, the calli were grown on 2,4-D-containing medium for 10 to 14 days (growth time for indica: 3 weeks) under light at 28° C.-32° C. in the presence of a selection agent. Alternatively co-cultivated calli were grown on 2,4-D-containing medium for 4 weeks in the dark at 28° C. in the presence of a selection agent. During this period, rapidly growing resistant callus developed. After transfer of this material to regeneration media, the embryogenic potential was released and shoots developed in the next four to six weeks. Shoots were excised from the calli and incubated for 2 to 3 weeks on an auxin-containing medium from which they were transferred to soil. Hardened shoots were grown under high humidity and short days in a greenhouse.

[0657] Transformation of rice cultivar indica can also be done in a similar way as give above according to techniques well known to a skilled person.

[0658] Approximately 35 to 90 independent TO rice transformants were generated for one construct. The primary transformants were transferred from a tissue culture chamber to a greenhouse. After a quantitative PCR analysis to verify copy number of the T-DNA insert, only single copy transgenic plants that exhibit tolerance to the selection agent were kept for harvest of T1 seed. Seeds were then harvested three to five months after transplanting. The method yielded single locus transformants at a rate of over 50% (Aldemita and Hodges 1996, Chan et al. 1993, Hiei et al. 1994).

### Example 8

### Transformation of Other Crops

### Corn Transformation

[0659] Transformation of maize (Zea mays) is performed with a modification of the method described by Ishida et al. (1996) Nature Biotech 14(6): 745-50. Transformation is genotype-dependent in corn and only specific genotypes are amenable to transformation and regeneration. The inbred line A188 (University of Minnesota) or hybrids with A188 as a parent are good sources of donor material for transformation, but other genotypes can be used successfully as well. Ears are harvested from corn plant approximately 11 days after pollination (DAP) when the length of the immature embryo is about 1 to 1.2 mm. Immature embryos are cocultivated with Agrobacterium tumefaciens containing the expression vector, and transgenic plants are recovered through organogenesis. Excised embryos are grown on callus induction medium, then maize regeneration medium, containing the selection agent (for example imidazolinone but various selection markers can be used). The Petri plates are incubated in the light at 25° C. for 2-3 weeks, or until shoots develop. The green shoots are transferred from each embryo to maize rooting medium and incubated at 25° C. for 2-3 weeks, until roots develop. The rooted shoots are transplanted to soil in the greenhouse. T1 seeds are produced from plants that exhibit tolerance to the selection agent and that contain a single copy of the T-DNA insert.

### Wheat Transformation

[0660] Transformation of wheat is performed with the method described by Ishida et al. (1996) Nature Biotech 14(6): 745-50. The cultivar Bobwhite (available from CIMMYT, Mexico) is commonly used in transformation. Immature embryos are co-cultivated with Agrobacterium tumefaciens containing the expression vector, and transgenic plants are recovered through organogenesis. After incubation with Agrobacterium, the embryos are grown in vitro on callus induction medium, then regeneration medium, containing the selection agent (for example imidazolinone but various selection markers can be used). The Petri plates are incubated in the light at 25° C. for 2-3 weeks, or until shoots develop. The green shoots are transferred from each embryo to rooting medium and incubated at 25° C. for 2-3 weeks, until roots develop. The rooted shoots are transplanted to soil in the greenhouse. T1 seeds are produced from plants that exhibit tolerance to the selection agent and that contain a single copy of the T-DNA insert.

### Soybean Transformation

[0661] Soybean is transformed according to a modification of the method described in the Texas A&M patent U.S. Pat. No. 5,164,310. Several commercial soybean varieties are amenable to transformation by this method. The cultivar Jack (available from the Illinois Seed foundation) is commonly used for transformation. Soybean seeds are sterilised for in vitro sowing. The hypocotyl, the radicle and one cotyledon are excised from seven-day old young seedlings. The epicotyl and the remaining cotyledon are further grown to develop axillary nodes. These axillary nodes are excised and incubated with Agrobacterium tumefaciens containing the expression vector. After the cocultivation treatment, the explants are washed and transferred to selection media. Regenerated shoots are excised and placed on a shoot elongation medium. Shoots no longer than 1 cm are placed on rooting medium until roots develop. The rooted shoots are transplanted to soil in the greenhouse. T1 seeds are produced from plants that exhibit tolerance to the selection agent and that contain a single copy of the T-DNA insert.

### Rapeseed/Canola Transformation

[0662] Cotyledonary petioles and hypocotyls of 5-6 day old young seedling are used as explants for tissue culture and transformed according to Babic et al. (1998, Plant Cell Rep 17: 183-188). The commercial cultivar Westar (Agriculture Canada) is the standard variety used for transformation, but other varieties can also be used. Canola seeds are surface-sterilized for in vitro sowing. The cotyledon petiole explants with the cotyledon attached are excised from the in vitro seedlings, and inoculated with Agrobacterium (containing the expression vector) by dipping the cut end of the petiole explant into the bacterial suspension. The explants are then cultured for 2 days on MSBAP-3 medium containing 3 mg/l BAP, 3% sucrose, 0.7% Phytagar at 23° C., 16 hr light. After two days of co-cultivation with Agrobacterium, the petiole explants are transferred to MSBAP-3 medium containing 3 mg/l BAP, cefotaxime, carbenicillin, or timentin (300 mg/l) for 7 days, and then cultured on MSBAP-3 medium with cefotaxime, carbenicillin, or timentin and selection agent until shoot regeneration. When the shoots are 5-10 mm in length, they are cut and transferred to shoot elongation medium (MSBAP-0.5, containing 0.5 mg/l BAP). Shoots of about 2 cm in length are transferred to the rooting medium (MS0) for root induction. The rooted shoots are transplanted to soil in the greenhouse. T1 seeds are produced from plants that exhibit tolerance to the selection agent and that contain a single copy of the T-DNA insert.

### Alfalfa Transformation

[0663] A regenerating clone of alfalfa (Medicago sativa) is transformed using the method of (McKersie et al., 1999 Plant Physiol 119: 839-847). Regeneration and transformation of alfalfa is genotype dependent and therefore a regenerating plant is required. Methods to obtain regenerating plants have been described. For example, these can be selected from the cultivar Rangelander (Agriculture Canada) or any other commercial alfalfa variety as described by Brown D C W and A Atanassov (1985. Plant Cell Tissue Organ Culture 4: 111-112). Alternatively, the RA3 variety (University of Wisconsin) has been selected for use in tissue culture (Walker et al., 1978 Am J Bot 65:654-659). Petiole explants are cocultivated with an overnight culture of Agrobacterium tumefaciens C58C1 pMP90 (McKersie et al., 1999 Plant Physiol 119: 839-847) or LBA4404 containing the expression vector. The explants are cocultivated for 3 d in the dark on SH induction medium containing 288 mg/L Pro, 53 mg/L thioproline, 4.35 g/L K2SO4, and 100 μm acetosyringinone. The explants are washed in half-strength Murashige-Skoog medium (Murashige and Skoog, 1962) and plated on the same SH induction medium without acetosyringinone but with a suitable selection agent and suitable antibiotic to inhibit Agrobacterium growth. After several weeks, somatic embryos are transferred to BOi2Y development medium containing no growth regulators, no antibiotics, and 50 g/L sucrose. Somatic embryos are subsequently germinated on half-strength Murashige-Skoog medium. Rooted seedlings were transplanted into pots and grown in a greenhouse. T1 seeds are produced from plants that exhibit tolerance to the selection agent and that contain a single copy of the T-DNA insert.

### Cotton Transformation

[0664] Cotton is transformed using Agrobacterium tumefaciens according to the method described in U.S. Pat. No. 5,159,135. Cotton seeds are surface sterilised in 3% sodium hypochlorite solution during 20 minutes and washed in distilled water with 500 μg/ml cefotaxime. The seeds are then transferred to SH-medium with 50 μg/ml benomyl for germination. Hypocotyls of 4 to 6 days old seedlings are removed, cut into 0.5 cm pieces and are placed on 0.8% agar. An Agrobacterium suspension (approx. 108 cells per ml, diluted from an overnight culture transformed with the gene of interest and suitable selection markers) is used for inoculation of the hypocotyl explants. After 3 days at room temperature and lighting, the tissues are transferred to a solid medium (1.6 g/l Gelrite) with Murashige and Skoog salts with B5 vitamins (Gamborg et al., Exp. Cell Res. 50:151-158 (1968)), 0.1 mg/l 2,4-D, 0.1 mg/l 6-furfurylaminopurine and 750 μg/ml MgCL2, and with 50 to 100 μg/ml cefotaxime and 400-500 μg/ml carbenicillin to kill residual bacteria. Individual cell lines are isolated after two to three months (with subcultures every four to six weeks) and are further cultivated on selective medium for tissue amplification (30° C., 16 hr photoperiod). Transformed tissues are subsequently further cultivated on non-selective medium during 2 to 3 months to give rise to somatic embryos. Healthy looking embryos of at least 4 mm length are transferred to tubes with SH medium in fine vermiculite, supplemented with 0.1 mg/l indole acetic acid, 6 furfurylaminopurine and gibberellic acid. The embryos are cultivated at 30° C. with a photoperiod of 16 hrs, and plantlets at the 2 to 3 leaf stage are transferred to pots with vermiculite and nutrients. The plants are hardened and subsequently moved to the greenhouse for further cultivation.

### Sugarbeet Transformation

[0665] Seeds of sugarbeet (Beta vulgaris L.) are sterilized in 70% ethanol for one minute followed by 20 min. shaking in 20% Hypochlorite bleach e.g. Clorox® regular bleach (commercially available from Clorox, 1221 Broadway, Oakland, Calif. 94612, USA). Seeds are rinsed with sterile water and air dried followed by plating onto germinating medium (Murashige and Skoog (MS) based medium (Murashige, T., and Skoog, ., 1962. Physiol. Plant, vol. 15, 473-497) including B5 vitamins (Gamborg et al.; Exp. Cell Res., vol. 50, 151-8.) supplemented with 10 g/l sucrose and 0.8% agar). Hypocotyl tissue is used essentially for the initiation of shoot cultures according to Hussey and Hepher (Hussey, G., and Hepher, A., 1978. Annals of Botany, 42, 477-9) and are maintained on MS based medium supplemented with 30 g/l sucrose plus 0.25 mg/l benzylamino purine and 0.75% agar, pH 5.8 at 23-25° C. with a 16-hour photoperiod. Agrobacterium tumefaciens strain carrying a binary plasmid harbouring a selectable marker gene, for example nptII, is used in transformation experiments. One day before transformation, a liquid LB culture including antibiotics is grown on a shaker (28° C., 150 rpm) until an optical density (O.D.) at 600 nm of ˜1 is reached. Overnight-grown bacterial cultures are centrifuged and resuspended in inoculation medium (O.D. ˜1) including Acetosyringone, pH 5.5. Shoot base tissue is cut into slices (1.0 cm×1.0 cm×2.0 mm approximately). Tissue is immersed for 30 s in liquid bacterial inoculation medium. Excess liquid is removed by filter paper blotting. Co-cultivation occurred for 24-72 hours on MS based medium incl. 30 g/l sucrose followed by a non-selective period including MS based medium, 30 g/l sucrose with 1 mg/l BAP to induce shoot development and cefotaxim for eliminating the Agrobacterium. After 3-10 days explants are transferred to similar selective medium harbouring for example kanamycin or G418 (50-100 mg/l genotype dependent). Tissues are transferred to fresh medium every 2-3 weeks to maintain selection pressure. The very rapid initiation of shoots (after 3-4 days) indicates regeneration of existing meristems rather than organogenesis of newly developed transgenic meristems. Small shoots are transferred after several rounds of subculture to root induction medium containing 5 mg/l NAA and kanamycin or G418. Additional steps are taken to reduce the potential of generating transformed plants that are chimeric (partially transgenic). Tissue samples from regenerated shoots are used for DNA analysis. Other transformation methods for sugarbeet are known in the art, for example those by Linsey & Gallois (Linsey, K., and Gallois, P., 1990. Journal of Experimental Botany; vol. 41, No. 226; 529-36) or the methods published in the international application published as WO9623891A.

### Sugarcane Transformation

[0666] Spindles are isolated from 6-month-old field grown sugarcane plants (Arencibia et al., 1998. Transgenic Research, vol. 7, 213-22; Enriquez-Obregon et al., 1998. Planta, vol. 206, 20-27). Material is sterilized by immersion in a 20% Hypochlorite bleach e.g. Clorox® regular bleach (commercially available from Clorox, 1221 Broadway, Oakland, Calif. 94612, USA) for 20 minutes. Transverse sections around 0.5 cm are placed on the medium in the top-up direction. Plant material is cultivated for 4 weeks on MS (Murashige, T., and Skoog, ., 1962. Physiol. Plant, vol. 15, 473-497) based medium incl. B5 vitamins (Gamborg, O., et al., 1968. Exp. Cell Res., vol. 50, 151-8) supplemented with 20 g/l sucrose, 500 mg/l casein hydrolysate, 0.8% agar and 5 mg/l 2,4-D at 23° C. in the dark. Cultures are transferred after 4 weeks onto identical fresh medium. Agrobacterium tumefaciens strain carrying a binary plasmid harbouring a selectable marker gene, for example hpt, is used in transformation experiments. One day before transformation, a liquid LB culture including antibiotics is grown on a shaker (28° C., 150 rpm) until an optical density (O.D.) at 600 nm of ˜0.6 is reached. Overnight-grown bacterial cultures are centrifuged and resuspended in MS based inoculation medium (O.D. ˜0.4) including acetosyringone, pH 5.5. Sugarcane embryogenic callus pieces (2-4 mm) are isolated based on morphological characteristics as compact structure and yellow colour and dried for 20 min. in the flow hood followed by immersion in a liquid bacterial inoculation medium for 10-20 minutes. Excess liquid is removed by filter paper blotting. Co-cultivation occurred for 3-5 days in the dark on filter paper which is placed on top of MS based medium incl. B5 vitamins containing 1 mg/l 2,4-D. After co-cultivation calli are washed with sterile water followed by a non-selective cultivation period on similar medium containing 500 mg/l cefotaxime for eliminating remaining Agrobacterium cells. After 3-10 days explants are transferred to MS based selective medium incl. B5 vitamins containing 1 mg/l 2,4-D for another 3 weeks harbouring 25 mg/l of hygromycin (genotype dependent). All treatments are made at 23° C. under dark conditions. Resistant calli are further cultivated on medium lacking 2,4-D including 1 mg/l BA and 25 mg/l hygromycin under 16 h light photoperiod resulting in the development of shoot structures. Shoots are isolated and cultivated on selective rooting medium (MS based including, 20 g/l sucrose, 20 mg/l hygromycin and 500 mg/l cefotaxime). Tissue samples from regenerated shoots are used for DNA analysis. Other transformation methods for sugarcane are known in the art, for example from the in-ternational application published as WO2010/151634A and the granted European patent EP1831378.

### Example 9

### Phenotypic Evaluation Procedure

### 9.1 Evaluation Setup

[0667] 35 to 90 independent T0 rice transformants were generated. The primary transformants were transferred from a tissue culture chamber to a greenhouse for growing and harvest of T1 seed. Six events, of which the T1 progeny segregated 3:1 for presence/absence of the transgene, were retained. For each of these events, approximately 10 T1 seedlings containing the transgene (hetero- and homo-zygotes) and approximately 10 T1 seedlings lacking the transgene (nullizygotes) were selected by monitoring visual marker expression. The transgenic plants and the corresponding nullizygotes were grown side-by-side at random positions. Greenhouse conditions were of shorts days (12 hours light), 28° C. in the light and 22° C. in the dark, and a relative humidity of 70%. Plants grown under non-stress conditions were watered at regular intervals to ensure that water and nutrients were not limiting and to satisfy plant needs to complete growth and development, unless they were used in a stress screen.

[0668] From the stage of sowing until the stage of maturity the plants were passed several times through a digital imaging cabinet. At each time point digital images (2048×1536 pixels, 16 million colours) were taken of each plant from at least 6 different angles. T1 events can be further evaluated in the T2 generation following the same evaluation procedure as for the T1 generation, e.g. with less events and/or with more individuals per event.

### Drought Screen

[0669] T1 or T2 plants were grown in potting soil under normal conditions until they approached the heading stage. They were then transferred to a “dry” section where irrigation was withheld. Soil moisture probes were inserted in randomly chosen pots to monitor the soil water content (SWC). When SWC went below certain thresholds, the plants were automatically re-watered continuously until a normal level was reached again. The plants were then re-transferred again to normal conditions. The rest of the cultivation (plant maturation, seed harvest) was the same as for plants not grown under abiotic stress conditions. Growth and yield parameters were recorded as detailed for growth under normal conditions.

### Nitrogen Use Efficiency Screen

[0670] T1 or T2 plants were grown in potting soil under normal conditions except for the nutrient solution. The pots were watered from transplantation to maturation with a specific nutrient solution containing reduced N nitrogen (N) content, usually between 7 to 8 times less. The rest of the cultivation (plant maturation, seed harvest) was the same as for plants not grown under abiotic stress. Growth and yield parameters were recorded as detailed for growth under normal conditions.

### Salt Stress Screen

[0671] T1 or T2 plants are grown on a substrate made of coco fibers and particles of baked clay (Argex) (3 to 1 ratio). A normal nutrient solution is used during the first two weeks after transplanting the plantlets in the greenhouse. After the first two weeks, 25 mM of salt (NaCl) is added to the nutrient solution, until the plants are harvested. Growth and yield parameters are recorded as detailed for growth under normal conditions.

### 9.2 Statistical Analysis: F Test

[0672] A two factor ANOVA (analysis of variants) was used as a statistical model for the overall evaluation of plant phenotypic characteristics. An F test was carried out on all the parameters measured of all the plants of all the events transformed with the gene of the present invention. The F test was carried out to check for an effect of the gene over all the transformation events and to verify for an overall effect of the gene, also known as a global gene effect. The threshold for significance for a true global gene effect was set at a 5% probability level for the F test. A significant F test value points to a gene effect, meaning that it is not only the mere presence or position of the gene that is causing the differences in phenotype.

[0673] When two experiments with overlapping events are carried out, a combined analysis is performed. This is useful to check consistency of the effects over the two experiments, and if this is the case, to accumulate evidence from both experiments in order to increase confidence in the conclusion. The method used is a mixed-model approach that takes into account the multilevel structure of the data (i.e. experiment-event-segregants). P values are obtained by comparing likelihood ratio test to chi square distributions.

### 9.3 Parameters Measured

[0674] From the stage of sowing until the stage of maturity the plants were passed several times through a digital imaging cabinet. At each time point digital images (2048×1536 pixels, 16 million colours) were taken of each plant from at least 6 different angles as described in WO2010/031780. These measurements were used to determine different parameters.

### Biomass-Related Parameter Measurement

[0675] The plant aboveground area (or leafy biomass) (“AreaMax”) was determined by counting the total number of pixels on the digital images from aboveground plant parts discriminated from the background. This value was averaged for the pictures taken on the same time point from the different angles and was converted to a physical surface value expressed in square mm by calibration. Experiments show that the aboveground plant area measured this way correlates with the biomass of plant parts above ground. The above ground area is the area measured at the time point at which the plant had reached its maximal leafy biomass.

[0676] Increase in root biomass is expressed as an increase in total root biomass (“rootMax”) (measured as maximum biomass of roots observed during the lifespan of a plant); or as an increase in the root/shoot index (“RootShInd”), measured as the ratio between root mass and shoot mass in the period of active growth of root and shoot. In other words, the root/shoot index is defined as the ratio of the rapidity of root growth to the rapidity of shoot growth in the period of active growth of root and shoot. Root biomass can be determined using a method as described in WO 2006/029987.

### Parameters Related to Development Time

[0677] The early vigour is the plant aboveground area three weeks post-germination. Early vigour was determined by counting the total number of pixels from aboveground plant parts discriminated from the background. This value was averaged for the pictures taken on the same time point from different angles and was converted to a physical surface value expressed in square mm by calibration.

[0678] AreaEmer is an indication of quick early development when this value is decreased compared to control plants. It is the ratio (expressed in %) between the time a plant needs to make 30% of the final biomass and the time needs to make 90% of its final biomass.

[0679] The “time to flower” or “flowering time” (“TimetoFlower”) of the plant can be determined using the method as described in WO 2007/093444.

### Seed-Related Parameter Measurements

[0680] The mature primary panicles were harvested, counted, bagged, barcode-labelled and then dried for three days in an oven at 37° C. The panicles were then threshed and all the seeds were collected and counted. The seeds are usually covered by a dry outer covering, the husk. The filled husks (herein also named filled florets) were separated from the empty ones using an air-blowing device. The empty husks were discarded and the remaining fraction was counted again. The filled husks were weighed on an analytical balance.

[0681] The total number of seeds was determined by counting the number of filled husks that remained after the separation step. The total seed weight was measured by weighing all filled husks harvested from a plant.

[0682] The total seed weight (“totalwgseeds”) was measured by weighing all filled husks harvested from a plant.

[0683] The total number of seeds (or florets=“nrtotalseeds”) per plant was determined by counting the number of husks (whether filled or not) harvested from a plant.

[0684] Thousand Kernel Weight (TKW) is extrapolated from the number of seeds counted and their total weight (“totalwgseeds/nrfilledseeds*1000”).

[0685] The Harvest Index (HI) in the present invention is defined as the ratio between the total seed weight and the above ground area (mm²) (=“totalwgseeds/AreaMax), multiplied by a factor 10⁶.

[0686] The number of flowers per panicle (“flowerperpan”) as defined in the present invention is the ratio between the total number of seeds over the number of mature primary panicles (=“nrtotalseeds/firstpan” and “firstpan”=number of panicles in the first flush).

[0687] The “seed fill rate” or “seed filling rate” as defined in the present invention is the proportion (expressed as a %) of the number of filled seeds (i.e. florets containing seeds=“nrfilledseeds”) over the total number of seeds (i.e. total number of florets=“nrtotalseed”). In other words, the seed filling rate is the percentage of florets that are filled with seed.

### Example 10

### Results of the Phenotypic Evaluation of the Transgenic Plants

### 1. DUF642 Polypeptides

[0688] The results of the evaluation of transgenic rice plants expressing a DUF642 nucleic acid under non-stress conditions are presented below.

[0689] In the first experiment A using SEQ ID NO: 1, an increase of at least 5% was observed for total seed yield (Totalwgseeds), number of seeds (nrfilledseed), seed fill rate (fillrate) and harvest index.

[0690] The results of the evaluation of transgenic rice plants in the T1 generation and expressing a nucleic acid encoding the DUF642 polypeptide of SEQ ID NO: 2 under non-stress conditions are presented below in Table D1. When grown under non-stress conditions, an increase of at least 5% was observed for total seed yield (Totalwgseeds), number of seeds (nrfilledseed), seed fill rate (fillrate) and harvest index. Moreover, two lines showed an increase in aboveground biomass (AreaMax), and one line showed an increase of Maximum height of the gravity center of the leafy biomass (GravityYMax).

TABLE D1
Data summary for transgenic rice plants; for each parameter,
the overall percent increase is shown for the T1 generation),
for each parameter the p-value is <0.05.

| Parameter | Overall increase |
|---|---|
| totalwgseeds | 16.5 |
| nrfilledseed | 15.8 |
| fillrate | 14.1 |
| harvestindex | 15.0 |

[0691] In the second experiment B using SEQ ID NO: 3, an increase of at least 5% was observed for total seed yield (Totalwgseeds), seed fill rate (fillrate) and greenness before flowering.

[0692] The results of the evaluation of transgenic rice plants in the T1 generation and expressing a nucleic acid encoding the DUF642 polypeptide of SEQ ID NO: 4 under non-stress conditions are presented below in Table D2. When grown under non-stress conditions, an increase of at least 5% was observed for total seed yield (Totalwgseeds), seed fill rate (fillrate) and greenness before flowering. Moreover, two lines showed an increase in above-ground biomass (AreaMax), Height of the highest tip of the plant (HeightMax) and Maximum height of the gravity center of the leafy biomass (GravityYMax).

TABLE D2
Data summary for transgenic rice plants; for each parameter,
the overall percent increase is shown for the T1 generation,
for each parameter the p-value is <0.05.

| Parameter | Overall increase |
|---|---|
| totalwgseeds | 7.2 |
| fillrate | 8.8 |
| Greenness before flowering | 3.8 |

[0693] In a further experiment, SEQ ID NO: 159 (in clade B) was used instead of SEQ ID NO: 1 in a drought screen as described above. The results of the evaluation of transgenic rice plants in the T1 generation and expressing a nucleic acid encoding the DUF642 polypeptide of SEQ ID NO: 160 under drought conditions showed an increase of at least 5% total number of seeds (nrtotalseed) and for aboveground biomass (AreaMax).

[0694] In yet another experiment, rice plants transformed with SEQ ID NO: 173 under control of the rice GOS2 promoter were used in a nitrogen use efficiency screen described above. The transgenic rice plants showed an increased fillrate compared to the control plants (overall increase for the 6 tested T1 lines was 10%, p<0.05).

### 2. Epimerase-Related Like Polypeptides

[0695] The results of the evaluation of transgenic rice plants of the T1 generation expressing the nucleic acid encoding an epimerase-related like polypeptide of SEQ ID NO: 198 under non-stress conditions are presented below in Table D3.

[0696] When grown under non-stress conditions, an increase of at least 5% was observed for parameters such as seed yield, including total weight of seeds (totalwgseeds), harvest index, and fill rate.

TABLE D3
Data summary for transgenic rice plants; for each parameter,
the overall percent increase is shown for the plants of the T1 generation
as compared to control plants, for each parameter the p-value is <0.05.

| Parameter | Overall increase |
|---|---|
| totalwgseeds | 8.6 |
| fillrate | 5.6 |
| harvestindex | 6.9 |

[0697] In addition, it could be noted that transgenic rice plants of at least one event showed an increase of at least 3% for the parameter thousand kernel weight (TKW) as compared to control plants.

[0698] Transgenic rice plants of at least two events showed an increase of at least 5% (and in particular on average 8 and 11% increase, respectively) in biomass, particularly above ground biomass (AreaMax), as compared to control plants.

[0699] Furthermore, there was a clear tendency for transgenic plants of at least four events to have an increase of at least 5% in number of filled seeds (nrfilledseed) as compared to control plants.

### 3. PLPCase Polypeptides

[0700] The results of the evaluation of transgenic rice plants in the T1 generation and expressing a nucleic acid comprising the longest Open Reading Frame in SEQ ID NO: 284 under nitrogen deficiency-stress conditions are presented below. See previous Examples for details on the generations of the transgenic plants.

[0701] The results of the evaluation of transgenic rice plants in the T1 generation and expressing a nucleic acid encoding the PLPCase polypeptide of SEQ ID NO: 285 under stress conditions are presented below in Table D4. When grown under nitrogen deficiency-stress conditions, an increase of at least 5% was observed for root biomass (RootMax, which is the maximal rootmass measured during the life of the plant and RootThickMax, which is the maximal mass of thick roots measured during the life of the plant).

TABLE D4
Data summary for transgenic rice plants; for each parameter,
the overall percent increase is shown for the T1 generation,
for each parameter the p-value is <0.05.

| Parameter | Overall increase |
|---|---|
| RootMax | 10.4 |
| RootThickMax | 6.0 |

[0702] In addition, plants expressing the above PLPCase showed two lines which were clearly positive for greenness index; three lines were clearly positive for roothinmax, which is the maximal mass of thin roots measured during the life of the plant; and one line was clearly positive for number of filled seeds.

[0703] The evaluation of transgenic rice plants expressing a nucleic acid encoding the PLPCase polypeptide of SEQ ID NO: 287 under non-stress conditions are presented below in Table D5. When grown under non-stress conditions, an increase of at least 5% was observed for root biomass (Root/Shoot Index), and for seed yield (fill rate). In addition, two plant lines expressing the FeS nucleic acid of SEQ ID NO: 286 showed increased total root biomass (resp increase of 14% and 11%, p≦1) and a third line showed increased amount of biomass of roots below a certain thickness threshold (RootThin, +7%, p<0.1).

TABLE D5
Data summary for transgenic rice plants; for each parameter, the overall
percent increase is shown, for each parameter the p-value is <0.05.

| Parameter | Overall increase |
|---|---|
| Root/Shoot Index | 11.9 |
| fillrate | 8.5 |

The application's sequence listing, which the Patent Office published only in electronic form, follows.

SEQUENCE LISTING (365 sequences)

SEQ ID NO: 1 - DNA, 1140 bp, Oryza sativa
atgagaagaaaaacagagatgattcagactaccccctgcgtcgcgctgctcttgctcgtcggcgttgcttttgctgctcgatcggcgtcggctatcaccgatggcctgctgccgaatggcaacttcgaggaggcgccggacgagtcgcagatgaacggcacgagggtgacgggtcgctacgcgatacctcagtgggagatctccgggttcgtggagtacatcgggtcgggccagaagcagggagacatgctcctgccggtgccggagggcgcgtacgccgtgcggctgggcaacgaggcctccatccagcagcggcttaccctgacgcggggaatgcactactccatcatattcagcgcggcgcgcacctgcgcccagtccgagctcctcaacatcacgatcacccccgagtccggcgagatccccatccagacggtgtacaccagcagcggctgggactcctactcctgggccttcaaggccaagcacagcgtcgtgttgttcatcgtccacaaccccggtgtctctgatgacgaagcttgcggccccctcatcgactcgttcgccattaagaccctgaaccctcctcaaagaacgaaaggtaacatgctgaagaatgggggcttcgaggagggcccgtacatcttccccaacacgtcctggggcgtgcttgtgccgcccatggacgaggacgactactcgccgctgtccccgtggacgatcctgtcgaccaccaagtccgtcaagtacatcgacgcggcgcactacgctgtgccgggcggcgcccgcgcggttgagctggtgtccggcatggagacggcgatgctgcaggaggtgagcaccgtgcccgggcggtcgtacaggctggagttctccgtcggggacgccggcgacgggtgctccgggtccctgaccgtgcaggcgtacgcgtcgcgcgggagcgtgaaggtgacgtaccagtcgcagggcacgggcggctacaagcgcgggctgctcgagttcacggccacggagaagcggacgcgggtagtgttcgtcagcatggcctacaccacgaagtccgacggcacgctgtgtggtcccgtcatcgacgacgcgtcgctcgtcagtgtccacagccaccgccggttccttctgtaa

SEQ ID NO: 2 - protein, 379 aa, Oryza sativa
MRRKTEMIQTTPCVALLLLVGVAFAARSASAITDGLLPNGNFEEAPDESQMNGTRVTGRYAIPQWEISGFVEYIGSGQKQGDMLLPVPEGAYAVRLGNEASIQQRLTLTRGMHYSIIFSAARTCAQSELLNITITPESGEIPIQTVYTSSGWDSYSWAFKAKHSVVLFIVHNPGVSDDEACGPLIDSFAIKTLNPPQRTKGNMLKNGGFEEGPYIFPNTSWGVLVPPMDEDDYSPLSPWTILSTTKSVKYIDAAHYAVPGGARAVELVSGMETAMLQEVSTVPGRSYRLEFSVGDAGDGCSGSLTVQAYASRGSVKVTYQSQGTGGYKRGLLEFTATEKRTRVVFVSMAYTTKSDGTLCGPVIDDASLVSVHSHRRFLL

SEQ ID NO: 3 - DNA, 909 bp, Oryza sativa
atggtgctggtggtccccgaggggagccacgcggtgcggctcgggaacgaggcgtcgatccggcagcggctcgccggcgcggcgcgcggcgcgcggtacgcgctcacgttcagcgcggcgcggacgtgcgcgcaggcggagcggctgaacgtgtcggcgtcggggcagtgggcggtgctccccatgcagaccatgtacagcagcaacggctgggactcgtacgcctgggcctgggatgccgccgccgacgcgttcgacgtcgtcatccacaaccccggcgtcaccgaggaccccgcctgcggccccctcatcgactccgtcgccatccgcaccctcaaccctcctcgccgcaccaacaagaacctggtgaagaacggggacttcgaggagggcccgtacatcatcccggggactaggtggggggtgctgatcccgtccatggtggtggacgagcactcgccgctgccggggtggatggtggagtcgctcaaggcggtgaagtacatcgacagcgaccacttcgcggtgccgcgcgggcggcgcgctgtcgagctgctggcggggcgggagagcgcgatcgcgcaggtgatccgcaccgtccccgggaggcagtacgcgctgtcgttcaccgtcggcgacgccagcaacggctgcgaggggtcgctggtggtggaggcgtacgccgggagggagtccaccagggtggcgcacgagtcggctggccgcggcggcgccgccaagcgcgccgtgctgccgttccgcgccgccgcggcgcgcacccgcgtcgtgttcttcagctcgttctacagcaccaggagcgacgacatgagctcgctctgcgggccggtgatcgacgacgtcgccgtcgtcagcgtgcgcgcgcggcggccggcggcgaagcgcggctag

SEQ ID NO: 4 - protein, 302 aa, Oryza sativa
MVLVVPEGSHAVRLGNEASIRQRLAGAARGARYALTFSAARTCAQAERLNVSASGQWAVLPMQTMYSSNGWDSYAWAWDAAADAFDVVIHNPGVTEDPACGPLIDSVAIRTLNPPRRTNKNLVKNGDFEEGPYIIPGTRWGVLIPSMVVDEHSPLPGWMVESLKAVKYIDSDHFAVPRGRRAVELLAGRESAIAQVIRTVPGRQYALSFTVGDASNGCEGSLVVEAYAGRESTRVAHESAGRGGAAKRAVLPFRAAAARTRVVFFSSFYSTRSDDMSSLCGPVIDDVAVVSVRARRPAAKRG

SEQ ID NO: 5 - DNA, 1122 bp, Oryza sativa
atgcgtcgcgtcacggtgctcgttctgctcctcgcctgcgcggcggcgcgcgccgccgccgccgtcgtcaccgacgggctgttgccgaacggcaacttcgaggagggcccacccaagtcggacctggtgaacggcacggtggtgcgcggcgcgaacgccatcccgcggtgggagacgtccgggttcgtggagtacatcgagtccgggcacaagcagggggacatgctgctggtggtgccgcagggcgcgcacgccgtgcgcctcggcaacgaggcgtccatccggcagcggctcgccgtgaccaggggcgcctactacgccgtcacgtttagcgcggcgcgcacctgcgcccaggcggagcagctcaacgtgtcggtgagccccgagtggggggtgctccccatgcagaccatctacggcagcaacgggtgggactcgtacgcgtgggcgttcaaggcgaagatggacgaggtggcgctcgtcatccacaacccgggcgtggaggaggacccggcgtgcggcccgctcatcgacggcgtcgccatcagggcgctgtacccgccgacgctggccaaggggaacatgctcaagaacggcgggttcgaggagggcccctacttcctccccaacgcgtcgtggggggtgctcgtcccgcccaacatcgaggacgaccactcgccgctcccggcgtggatgatcatgtcgtccaaggccgtcaagtacgtcgacgccgcgcacttcgccgtgccgcagggcgcccgcgccgtggagctggtggggggcaaggagtcggcgctggtgcaggaggtgcgcaccgtgcccgggtggacgtaccgcctgtcgttcgccgtgggcgacgcgcgcgacgggtgcgcgggctccatggtcgccgaggcgtacgcggcgagggcctccatcaaggtgccgtacgagtccaagggcaccggcgggtacaagcgcgccgtcctcgagttcgccgccatcgccaaccgcacccgcgtcgtgttccagagcacgttctaccacaccatgaccgacggctcgctctgcgggccggtcatcgacgacgcctccctcgtcggcctccgcaagaagacggccggccggcggctgctcctgtaa

SEQ ID NO: 6 - protein, 373 aa, Oryza sativa
MRRVTVLVLLLACAAARAAAAVVTDGLLPNGNFEEGPPKSDLVNGTVVRGANAIPRWETSGFVEYIESGHKQGDMLLVVPQGAHAVRLGNEASIRQRLAVTRGAYYAVTFSAARTCAQAEQLNVSVSPEWGVLPMQTIYGSNGWDSYAWAFKAKMDEVALVIHNPGVEEDPACGPLIDGVAIRALYPPTLAKGNMLKNGGFEEGPYFLPNASWGVLVPPNIEDDHSPLPAWMIMSSKAVKYVDAAHFAVPQGARAVELVGGKESALVQEVRTVPGWTYRLSFAVGDARDGCAGSMVAEAYAARASIKVPYESKGTGGYKRAVLEFAAIANRTRVVFQSTFYHTMTDGSLCGPVIDDASLVGLRKKTAGRRLLL

SEQ ID NO: 7 - DNA, 1134 bp, Oryza sativa
atggcgttctataatggcgcgagtgttgtcgcgctgctgttgctggtctccacggctgctcgagctgccggcgatggcctgctgctcaacggcaacttcgagtaccagccgagcaagtcacagatgaacggcacaagggtgatggcggagtacgcgatcccgtactggaagatcaccgggttcgtggagtacatctcgtccgggcagaagcagggcgacatgctgctgacggtgccagagggcgcgcacgccgtgcggctgggcaacgaggcctccatcgagcagcagatcagcgtgacccggggcatgtactactccatcacattcagcgccgcgcgcacctgcgcccagtccgagaagctgaacgtgtcagtggctcccggcccggagtccggcgagctccccatccagaccgtgtacaccagcagcggctgggactcgtacgcctgggcgttcaaggccaagcgcggcctcgtgtcgctcatcatccacaaccacggcgaggacgacgaccccgcgtgcggcccgctcatcgactccgtcgccatcaagaccctgtaccctcctcaggccacccagaacaacatgctgagaaacggggacttcgaggaggggccgtacatgttcccgaacgcggcgtggggagtgatggtgccgccgatctcagaggacgaccactcgccgctgccggggtggatggtgatgtcggacacgaaggccgtcaagtgcgtcgactccgcgcacttcaccgtgccgcacggcgcgcgcgccgtggagctggtgtccgggctcgagacggcgctgatgcaggaggtgcgcaccgtgccggggaggtcgtacaggctggagttctcggtcggggacgccagcgacggttgcgtgggttccatgcaggtgaaagggtacgcgggtcaggggtgcacgaccgtgacgtacagctcccagggcacgggcgggcacacccgcgcgtcgctggagttcgccgccgtcgcgaacaccacgcgggtggtgttcgtcagctcgacgtacatcaccaagtgggacgggacgctgtgcgggcccgtcgtcgacgacgcctcgctcgtgtgcgtgtcccagcagcagccgcccgctcgccgcctgcttcgtctctga

SEQ ID NO: 8 - protein, 377 aa, Oryza sativa
MAFYNGASVVALLLLVSTAARAAGDGLLLNGNFEYQPSKSQMNGTRVMAEYAIPYWKITGFVEYISSGQKQGDMLLTVPEGAHAVRLGNEASIEQQISVTRGMYYSITFSAARTCAQSEKLNVSVAPGPESGELPIQTVYTSSGWDSYAWAFKAKRGLVSLIIHNHGEDDDPACGPLIDSVAIKTLYPPQATQNNMLRNGDFEEGPYMFPNAAWGVMVPPISEDDHSPLPGWMVMSDTKAVKCVDSAHFTVPHGARAVELVSGLETALMQEVRTVPGRSYRLEFSVGDASDGCVGSMQVKGYAGQGCTTVTYSSQGTGGHTRASLEFAAVANTTRVVFVSSTYITKWDGTLCGPVVDDASLVCVSQQQPPARRLLRL

SEQ ID NO: 9 - DNA, 1140 bp, Oryza sativa
atgagaagaaaaacagagatgattcagactaccccctgcgtcgcgctgctcttgctcgtcggcgttgcttttgctgctcgatcggcgtcggctatcaccgatggcctgctgccgaatggcaacttcgaggaggcgccggacaagtcgcagatgaacggcacgagggtgacgggtcgctacgcgatacctcagtgggagatctccgggttcgtggagtacatcgggtcgggccagaagcagggagacatgctcctgccggtgccggagggcgcgtacgccgtgcggctgggcaacgaggcctccatccagcagcggcttaccctgacgcggggaatgcactactccatcacattcagcgcggcgcgcacctgcgcccagtccgagctcctcaacatcacgatcacccccgagtccggcgagatccccatccagacggtgtacaccagcagcggctgggactcctactcctgggccttcaaggccaagcacagcgtcgtgttgttcatcgtccacaaccccggtgtctctgatgacgaagcttgcggccccctcatcgactcgttcgccattaagaccctgaaccctcctcaaagaacgaaaggtaacatgctgaagaatgggggcttcgaggagggcccgtacatcttccccaacacgtcctggggcgtgcttgtgccgcccatggacgaggacgactactcgccgctgtccccgtggacgatcctgtcgaccaccaagtccgtcaagtacatcgacgcggcgcactacgctgtgccgggcggcgcccgcgcggttgagctggtgtccggcatggagacggcgatgctgcaggaggtgagcaccgtgcccgggcggtcgtacaggctggagttctccgtcggggacgccggcgacgggtgctccgggtccctgaccgtgcaggcgtacgcgtcgcgcgggagcgtgaaggtgacgtaccagtcgcagggcacgggcggctacaagcgcgggctgctcgagttcacggccacggagaaacggacgcgggtagtgttcgtcagcatggcctacaccacgaagtccgacggcacgctgtgtggtcccgtcatcgacgacgcgtcgctcgtcagtgtccacagccaccgccggttccttctgtaa

SEQ ID NO: 10 - protein, 379 aa, Oryza sativa
MRRKTEMIQTTPCVALLLLVGVAFAARSASAITDGLLPNGNFEEAPDKSQMNGTRVTGRYAIPQWEISGFVEYIGSGQKQGDMLLPVPEGAYAVRLGNEASIQQRLTLTRGMHYSITFSAARTCAQSELLNITITPESGEIPIQTVYTSSGWDSYSWAFKAKHSVVLFIVHNPGVSDDEACGPLIDSFAIKTLNPPQRTKGNMLKNGGFEEGPYIFPNTSWGVLVPPMDEDDYSPLSPWTILSTTKSVKYIDAAHYAVPGGARAVELVSGMETAMLQEVSTVPGRSYRLEFSVGDAGDGCSGSLTVQAYASRGSVKVTYQSQGTGGYKRGLLEFTATEKRTRVVFVSMAYTTKSDGTLCGPVIDDASLVSVHSHRRFLL

SEQ ID NO: 11 - DNA, 1134 bp, Oryza sativa
atgagaaggaaaacagagatggtgcggagcacctgctgcgtggtgctgctcttgctcctcagcgttgctgctcgatcggcttcggccatcatggacggcctgctgccgaatggcaatttcgaggaggcgccggacaagtcgcagctgaacggcacgagggtgatcgggcgctacgcgataccgcagtgggagatctccgggttcgtggagtacatcgggtcgggccagatgcagggtgacatgctcctgccggtgccggagggcgcgtacgccgtgcggctgggcaacgaggcctccatccagcagcggctcaccctgacgcggggaatgcactactccgtcaccttcagcgcggcgcgcacctgcgcccagtccgagctcctcaacatcacggtcaccccggagatcggcgaggtccccatccagaccgtgtacaccagcagcggctgggactcctactcctgggcgttcaaggcgagacgcagcgacgtgtcgctcatcgttcacaaccctggcgtcaccgatgacgcggcctgcggccccctcatcgactcgttcgccatcaagactctgcaatctcctccaagcaccaaagataacttgctgaagaatgggggcttcgaggaaggcccgtacatcttccccaacacgtcgtggggcgtgcttgtgccgccgatggacgaggacgactactcgccactgtcgccatggacgatcatgggatacaccaagtccgtcaagtacgtggacgcggcgcactacgccgttccaggcggcgcacgcgcggtggagctggtggccggcatggaggcggcgctggtgcaggaggtgtgcaccgtgcccgggcggtcgtaccggctggagttctccgtcggggacgccggcgacgggtgcgtggggtccatgtccgtgcaggcgtacgtgtcgcacggcagcgtgaaggtgccgtacgagtcgcagggcaggggtgggtacaagcgcggggtgctcgagttcacggcgacggacaagcggacgcgggtggtgttcgtcagcatggcctacaccatgaagcccgacggcacgctctgtgggcccgtcgtcgacgacgcgtcggtcgtcggcgtccacagccatcgccggcttcttctgtaa

SEQ ID NO: 12 - protein, 377 aa, Oryza sativa
MRRKTEMVRSTCCVVLLLLLSVAARSASAIMDGLLPNGNFEEAPDKSQLNGTRVIGRYAIPQWEISGFVEYIGSGQMQGDMLLPVPEGAYAVRLGNEASIQQRLTLTRGMHYSVTFSAARTCAQSELLNITVTPEIGEVPIQTVYTSSGWDSYSWAFKARRSDVSLIVHNPGVTDDAACGPLIDSFAIKTLQSPPSTKDNLLKNGGFEEGPYIFPNTSWGVLVPPMDEDDYSPLSPWTIMGYTKSVKYVDAAHYAVPGGARAVELVAGMEAALVQEVCTVPGRSYRLEFSVGDAGDGCVGSMSVQAYVSHGSVKVPYESQGRGGYKRGVLEFTATDKRTRVVFVSMAYTMKPDGTLCGPVVDDASVVGVHSHRRLLL

SEQ ID NO: 13 - DNA, 1119 bp, Oryza sativa
atgactgggagcgcgcgtagcgtcgtggcgctgctcttcttgctcgtcggctcggctgctcgggccgattcagccgtcaccgatggcctgttgccaaatggcaacttcgaggacgggccggacaagtcccagctgaacggcacggtggtgacgggtcgatacgccatactgaactgggagatctcggggttcgtggagtacatcgagtccgggcacagggagcaggacatgatcctggcggtgccggagggcgcgcgcgccgtgcgattgggcaacgacgccaccatccggcagaggcttagcgtgacgcggcgcgcttactactccatcactttcagcgcggcgcgcacctgcgcccagaaggagaagctgaacatgtccgtcacaccggagttcggcgtgctcccgatccagacggtttacaccagcagcggctgggactcctactcctgggccttcagggccaaacacagcgtcgtgtggctctccatccacaaccccggcgaggaggaggacccggcgtgcggcccgctcattgactccattgccatcaagaacctctaccctcctccccgcaccaaaggaaacatgttgagaaacggagacctggaggaggggccgtacatcttcccggacgcgacgtggggcgtgctggtgccaccgatcttcgaggacgagcactcgccgctgccggggtggatgatcatgtcggacacgaaggtcatcaagtacgtggactcgccgcaccacagggtgccgcagggcgcgcgcgccgtggagcttgtggccggcagggagaccgcgctggtgcaggaggtggcgaccgtgcccgggcggtcgtacaggctgtcgttctccgtcggggacgcgggcaacgggtgcaaggattcgctggccgtggaggcgtacgcggcgcgggccacggccaaggtgccgtacgagtcgcagggcacgggcgggcacaagcgcgcccagctcgagttcgcggcggtcgcgaacctgacgcgcgtggtgttccagagcttcaactaccacacgaagccggacgggacgctgtgcgggcctctcgtcgatgacatctccctcgtcagcgtacgcaagcgcgctgctcgcctgtaa

SEQ ID NO: 14 - protein, 372 aa, Oryza sativa
MTGSARSVVALLFLLVGSAARADSAVTDGLLPNGNFEDGPDKSQLNGTVVTGRYAILNWEISGFVEYIESGHREQDMILAVPEGARAVRLGNDATIRQRLSVTRRAYYSITFSAARTCAQKEKLNMSVTPEFGVLPIQTVYTSSGWDSYSWAFRAKHSVVWLSIHNPGEEEDPACGPLIDSIAIKNLYPPPRTKGNMLRNGDLEEGPYIFPDATWGVLVPPIFEDEHSPLPGWMIMSDTKVIKYVDSPHHRVPQGARAVELVAGRETALVQEVATVPGRSYRLSFSVGDAGNGCKDSLAVEAYAARATAKVPYESQGTGGHKRAQLEFAAVANLTRVVFQSFNYHTKPDGTLCGPLVDDISLVSVRKRAARL

SEQ ID NO: 15 - DNA, 1389 bp, Oryza sativa
atggcacagccccagtgccccaggccccaagctcgaacccccaacccgctgtgcgcggcgacgccgtggccccgagctgggcggcgtgcaaactggagaggaatcttctgtagcagatggtccccaagttgccgtgatgccttccgtacgatccagccggcgcgtctcgcggcgtcccggactcatcctccctgcacagatcacacaagttgtaataagcaacagctcttatatatctccagcgaagttcgagtgctggaccgtgtgacgagagctcatgatcatggtcttggcgaagtgcacgcgctgcctggctcttgtggtggtggtgctcgttggcgtggctgcaccggtggtcttctctgtcaccgatggccttctaccaaacggcaacttcgagcacgggccggacaagtcccagctgaaccgaactgggagatctctgggttcgtggagtacatcgggtccgggcacaaggagcaggacatgatcctggcggtgccggagggcgcgtacgccgtgcgcctgggcaacgacgcaaccatccggcagcggatcagcgtcacccgtcacatgtactactctgtcacattcagcgccgcgcgcacctgcgcccaggccgagaagctgaacgtgtccgtcacgcttgagttcggcgtgctcccgatccagaccgtgtacaccagcaccggctgggactcctactcctgggccttcaaggccgaacacagcgccgtgtggctctccatccacaaccccggcgtcgaggaggacccggcctgcggcccactcatcgacctcgtcgccatcaagactcttcctcctccccatcacaccaggggtggtacaatgctgaggaacggggacttcgaggagggcccgtacatcttcgccgacacgccgtggggtgtcctggtgccgccgatggacgaggacgtgcactcgccgctgcccgggtggatggtcatgtcgaccacgaaggtcgtcaagtacgtggactcggcgcgccacgcggtgccgagcggcgcgcacgccgtggagatggtggccgggagggagtgcgcgctggtgcaggaggtggcgaccgtgcccgggcggcggtacacgctgtcgttctccgtcggggacgccggcaacgggtgcatcgggtcccttgccgtggacgcgtacgcggcgcgggcgacgctgaaggtgtcgtacgagtcgcggggcactggcgggcacgagcgcgccgagctcgtgttcgcggcggtcgccaaccggacgcgcgtggtgttccacagctccaaccaccatatgaagtcggacggcacgctgtgcggtcctgtggtcgatgacgtctccctcgtcagtgtggacaagcacacggttcgccggttgttgatgtag

SEQ ID NO: 16 - protein, 462 aa, Oryza sativa
MAQPQCPRPQARTPNPLCAATPWPRAGRRANWRGIFCSRWSPSCRDAFRTIQPARLAASRTHPPCTDHTSCNKQQLLYISSEVRVLDRVTRAHDHGLGEVHALPGSCGGGARWRGCTGGLLCHRWPSTKRQLRARAGQVPAEPNWEISGFVEYIGSGHKEQDMILAVPEGAYAVRLGNDATIRQRISVTRHMYYSVTFSAARTCAQAEKLNVSVTLEFGVLPIQTVYTSTGWDSYSWAFKAEHSAVWLSIHNPGVEEDPACGPLIDLVAIKTLPPPHHTRGGTMLRNGDFEEGPYIFADTPWGVLVPPMDEDVHSPLPGWMVMSTTKVVKYVDSARHAVPSGAHAVEMVAGRECALVQEVATVPGRRYTLSFSVGDAGNGCIGSLAVDAYAARATLKVSYESRGTGGHERAELVFAAVANRTRVVFHSSNHHMKSDGTLCGPVVDDVSLVSVDKHTVRRLLM

SEQ ID NO: 17 - DNA, 1119 bp, Panicum virgatum
atgcgccgcgtcgcgctgttgctgctcgtctgcgcggcggcgcgcgccgccgcggtcgtcaccgacgggctgctcccgaacggcaacttcgaggagggcccgcccaagtcggcgctggtgaacggcacggtggtgaagggcgccaacgcgatcccgcgctgggagacgtcgggcttcgtggagtacatcgagtccgggcacaagcagggcgacatgctcctggtggtcccgcagggcgcccacgccgtgcgcctgggcaacgaggcctccatccgccagcgcctcgccgtcacccgcggcgcctactacgccatcaccttcagcgcggcgcgcacctgcgcgcaggccgagcgcctcaacatctcggtgagccccgagtggggcgtgctcccgatgcagaccatctacggcagcaacggctgggactcgtacgcctgggccttcaaggccaagctcgacgccgtcacgctcgtcatccacaaccccggcgtcgaggaggaccccgcctgcggcccgctcatcgacggcgtcgccatccgcgcgctctacccgcccaggctcgcccgcggcaacatgctcaagaacggcggcttcgaggagggcccctacttcctgcccggcgcgtcctggggcgtgctcgtgccgcccaacatcgaggacgaccactcgccgctccccgcctggatgatcgcctcctccaaggccgtcaagtacgtggacgccgcgcacttcagggtgccccagggcgcgcgcgccgtcgagctggtgggcggccgggagagcgcgctcgtgcaggaggtgcgcaccgtgcccgggtggagctaccgcctcgccttcgccgtgggcgacgccggcgacggctgcgcggggcccatggtcgccgaggccttcgcggcgcgcgccaccgtcaaggtgccctacgagtccaagggcaccggcgggtacaagcgcgccgtgctggacttcacggccatcgccaaccgcacccgcgtcgtgttccagagcaccttctaccacatgaaggccgacggcacgctctgcgggcccctcgtcgacgacgcctcgctcgtcgggctgcgcaagaagcccgccgccggcagccgccgcctgctgctgtga

SEQ ID NO: 18 - protein, 372 aa, Panicum virgatum
MRRVALLLLVCAAARAAAVVTDGLLPNGNFEEGPPKSALVNGTVVKGANAIPRWETSGFVEYIESGHKQGDMLLVVPQGAHAVRLGNEASIRQRLAVTRGAYYAITFSAARTCAQAERLNISVSPEWGVLPMQTIYGSNGWDSYAWAFKAKLDAVTLVIHNPGVEEDPACGPLIDGVAIRALYPPRLARGNMLKNGGFEEGPYFLPGASWGVLVPPNIEDDHSPLPAWMIASSKAVKYVDAAHFRVPQGARAVELVGGRESALVQEVRTVPGWSYRLAFAVGDAGDGCAGPMVAEAFAARATVKVPYESKGTGGYKRAVLDFTAIANRTRVVFQSTFYHMKADGTLCGPLVDDASLVGLRKKPAAGSRRLLL

SEQ ID NO: 19 - DNA, 1128 bp, Sorghum bicolor
atgcggcgcgtcgcgctgttgctgctcctcgtatgcgcgctggcgcgggctgccgcggtcgtcaccgacggtcttctcccgaacggcaacttcgaggatggcccgcccaagtcggcgctggtgaacggcacggtggtgtcgggcgccaacgccatcccgcgctgggagacctccggcttcgtggagtacatcgagtcgggccacaagcagggcgacatgctgctggtggtgccgcagggcgcccacgccgtgcgcctgggcaacgaggcctccatccggcagcgcctcgccgtggcgcgcggcgcctactacgccatcaccttcagcgcggcgcggacgtgcgcgcaggcggaggcgctcaacgtgtcggtgagccccgagtggggtgtgctcccgatgcagaccatctacggcagcaacggctgggactcgtacgcctgggccttcaaggcgaagctgagcaccgtgacgctcgtcatccacaaccccggcgtggaggaggaccccgcctgcggcccgctcatcgacggcgtcgccatccgggcgctgtacccgccgacgctcgccagggggaacatgctcaagaacggcgggttcgaggagggcccctacttcctgcccaacgcgtcgtggggcgtgctggtgccgccaaacatcgaggacgaccactcgccgctccccggctggatgatcgcctcctccaaggccgtcaagtacgtggacgccgcgcacttcgccgtgccccagggcgcgcgcgccgtcgagctggtgggcgggcgggagagcgcgctggtccaggaggtgcgcaccgtgcccgggtggagctaccgcctcgccttcgccgtgggggactccggcgacggctgcacggggtccatggtcgccgaggcctacgcggcgcgcgccaccgtcaaggtgccgtacgagtccaagggcaccggagggtacaagcgcgccgtgctcgacttcacggccgtcgccaaccgcacacgcgtcgtgttccagagcaccttctaccacatgaaggccgacggcacgctctgcggcccgctcgtcgacgacgcctccgtcgtcggcctgcgcaagaagcctgccgccgccggccgccgcctcctgcagttcctgtaa

SEQ ID NO: 20 - protein, 375 aa, Sorghum bicolor
MRRVALLLLLVCALARAAAVVTDGLLPNGNFEDGPPKSALVNGTVVSGANAIPRWETSGFVEYIESGHKQGDMLLVVPQGAHAVRLGNEASIRQRLAVARGAYYAITFSAARTCAQAEALNVSVSPEWGVLPMQTIYGSNGWDSYAWAFKAKLSTVTLVIHNPGVEEDPACGPLIDGVAIRALYPPTLARGNMLKNGGFEEGPYFLPNASWGVLVPPNIEDDHSPLPGWMIASSKAVKYVDAAHFAVPQGARAVELVGGRESALVQEVRTVPGWSYRLAFAVGDSGDGCTGSMVAEAYAARATVKVPYESKGTGGYKRAVLDFTAVANRTRVVFQSTFYHMKADGTLCGPLVDDASVVGLRKKPAAAGRRLLQFL

SEQ ID NO: 21 - DNA, 1203 bp, Sorghum bicolor
atggcgatcggtaagcggagcgtgcacggcgccgcgctggtcctgctgctggtggtctgcgtcgcggcgcgggctgtctcggccgtcggcgatggtcctctactgaacggcaacttcgaggactcgccgaacccctcccagatgagcggctcggtggtgacaggggagcacgcgatctcctactggaggacgtccggccacatcgagttcatctgctccggccagacgcagggggacatggtcttgacggtgccggacggcgcgcacgccctgcggttgggcaacggcgcctccatcgagcagcggatcagcctcacgccgggctcgtactactccctcacgttcagcgcgtcgcgcacctgcgcccaggacgaggtgctcaacgtgacggccgcccccgtgtccggctccggcgccgcggcccagaccggcgagctccccatccagacggtgtacaccagcagcggctgggactcctactcctgggccttcaaggcggaggccggcctcgtgtccatcatcatcacccacatctgcggcgaacaggaagaccccgcgtgcggccccgtcgtcgacgccttcgccatcaagacgctcagccagcctgaggccacgggagataacctgctgaggaacggggacttcgaggagggcccgtacatcccgccggagtcgccgtgtggagtgatgctgccgccgatggaccaggactgcgtctccccgctgcccgggtggaagatcatgtcgtacaagaagtcggtcaagtacgtggactcggcgcacttcgcggtgccgcgcggcgcgcgcgccgtggagctggtgtccggcgtggagaccgcgctgatgcaggaggtgtacaccaccgtggaagggagctggtacaggctcgagttctcggtcggggacgccgccaacggctgcgcgtcgccgtcgtatgacgatggttcctcgtccggcgggatgaaggtgaaggcatacgcggggtcgagcgaaaccaccgtggacatcgatttccacggcgccggcggttccaaacgcgggaagatcgagttcagggccaccgcgaaccccaccagggtggtgttcgtcagcttgggctaccacaccaagtgcgacaacagcggcacgctctgcgggcccgtcgtagacgacgtctcgctcgtccccataccgcagccgtatgctcgccggctacttctctag

SEQ ID NO: 22 - protein, 400 aa, Sorghum bicolor
MAIGKRSVHGAALVLLLVVCVAARAVSAVGDGPLLNGNFEDSPNPSQMSGSVVTGEHAISYWRTSGHIEFICSGQTQGDMVLTVPDGAHALRLGNGASIEQRISLTPGSYYSLTFSASRTCAQDEVLNVTAAPVSGSGAAAQTGELPIQTVYTSSGWDSYSWAFKAEAGLVSIIITHICGEQEDPACGPVVDAFAIKTLSQPEATGDNLLRNGDFEEGPYIPPESPCGVMLPPMDQDCVSPLPGWKIMSYKKSVKYVDSAHFAVPRGARAVELVSGVETALMQEVYTTVEGSWYRLEFSVGDAANGCASPSYDDGSSSGGMKVKAYAGSSETTVDIDFHGAGGSKRGKIEFRATANPTRVVFVSLGYHTKCDNSGTLCGPVVDDVSLVPIPQPYARRLLL

SEQ ID NO: 23 - DNA, 1140 bp, Sorghum bicolor
atgggaaggggaagcgagacagtgccgaacgcccgtcgagctgcgctgttcttgatcgtctgcttggcggctcgagcggcttcggcaatccaggatggcctgctgccgaacggcaacttcgaggaggcgccacccaagtcgcagctcaaaggctcgagggtgatggggcgcaacgcgataccgcactgggagatctcggggttcgtggagtacatcggatccgggcagaagcagggtgacatgctcctgccggtgccggagggcgcctacgccgtgcggctcgggaacgaggcctccatccagcagcgtctcgccctgacgcagggcgcgcactactccatcaccttcagcgcggcgcgcacctgcgcccaggccgagcagctcaacgtcacggtcgcccccgagtcggacattctccctatccagacggtgtacaccagcagcggctgggactcctactcctgggccttcaaggccacgagcagcgtcgtctcgctgatcatccacaaccccggtgtcgccgaggacgcagcctgcggccccctcatcgacttgttcgccattaagaccctgccgacgcctcagagcagcaagaataatctgctgaagaatggggacttcgaggagggcccgtacatcttccccaacacgcggtggggggtgctggtgccgcccatggacgaggacgactactcgccgctgtcgccgtggatgatcctgtcgtccaccaagtcggtgaagtacgtggacgcgccgcaccacgtcgtgccgcacggtgcccgcgccgtggagctggtgtccggcatggagacagcgctggtgcagaacgcgaccaccgttcccggactgccctacaggcttcagttctcggccggggacgccggcaacggctgcgtgggctccatggctgtccaggcgtacgccgggggcaagagcgtgaaggcgcagttccagtcccagggcaaaggcggccacaagcgcggcgtgctggacttcacggcgaccgcggaccagacgcgggtggtgttcgtcagcatgggctacatcatgaagcccgacggcacgctctgtggaccggtcgtcgacgacgtctcgctagtctgcacgcggaaccatcctgctcgccgcttgcttctgtga

SEQ ID NO: 24 - protein, 379 aa, Sorghum bicolor
MGRGSETVPNARRAALFLIVCLAARAASAIQDGLLPNGNFEEAPPKSQLKGSRVMGRNAIPHWEISGFVEYIGSGQKQGDMLLPVPEGAYAVRLGNEASIQQRLALTQGAHYSITFSAARTCAQAEQLNVTVAPESDILPIQTVYTSSGWDSYSWAFKATSSVVSLIIHNPGVAEDAACGPLIDLFAIKTLPTPQSSKNNLLKNGDFEEGPYIFPNTRWGVLVPPMDEDDYSPLSPWMILSSTKSVKYVDAPHHVVPHGARAVELVSGMETALVQNATTVPGLPYRLQFSAGDAGNGCVGSMAVQAYAGGKSVKAQFQSQGKGGHKRGVLDFTATADQTRVVFVSMGYIMKPDGTLCGPVVDDVSLVCTRNHPARRLLL

SEQ ID NO: 25 - DNA, 1125 bp, Sorghum bicolor
atggtgcagaacgctccccacgctgcgctgttcttgctcgtcgccttggctgcccgagcagcttcggccatcccggacggcctgctgccgaacggcaacttcgaggaggcgccggcgaaatcggagctcaacggcacgcgggtgaaggggcgcgacgcgatcccgcactgggagatctccgggttcgtggagtacatcgggcccggccagaagcagggggacatgatcctcccggtgccggagggcgcctacgccgtgcggctggggaacgaggcctccatccagcagcggctcgccgtgacgcagggcgcgcgctactccgtcaccttcagcgcggcgcgcacctgcgcccaggccgagcagctcaacgtcacggtcgccaccgactccgacgtgctccccatccagacggtgtacacgagcagtggctgggactcctactcctgggccttcgaggctacgcgcagcgccgtgacgctcatcgtccataaccccggcgtcactgaagacccggcctgcggccctctcctcgacgcgtttgccatcaagactctccagcctcctcctgtgctcgccaaaaataacatgatccagaacggggacttcgaggagggtccgtacatcttccccgacgcgccgtggggggtgctggtgccgccaatggacgaggacgactactcgccgttgtcgccatggatgatcctgtcgacgaccaagtccgtcaagtacctggacgcggcgcactacgccgtgccgcacggcgcgcgcgccgtggagctgctgtccggcgtggagaccgcactggcgcaggacgtggccaccgtggccgggcggccgtacaggctcgagttctccaccggggacgccggggacgggtgctccggctcgttgtccctgcgggcatatgcggcgagcggtagcgtgacggtgccgcacgagtcacagggcaggggtgggcacaagcgcggcgtgctggacttcacggcgaccgcggaccggacgcgggtggcgttcgtcagtatggcctacaccatgaagagcgacgggacgctctgtgggcccgtcctcgacgatgtctcgctcgtcggcttgcacagccgtgctgctcgccggttccttctgtag

SEQ ID NO: 26 - protein, 374 aa, Sorghum bicolor
MVQNAPHAALFLLVALAARAASAIPDGLLPNGNFEEAPAKSELNGTRVKGRDAIPHWEISGFVEYIGPGQKQGDMILPVPEGAYAVRLGNEASIQQRLAVTQGARYSVTFSAARTCAQAEQLNVTVATDSDVLPIQTVYTSSGWDSYSWAFEATRSAVTLIVHNPGVTEDPACGPLLDAFAIKTLQPPPVLAKNNMIQNGDFEEGPYIFPDAPWGVLVPPMDEDDYSPLSPWMILSTTKSVKYLDAAHYAVPHGARAVELLSGVETALAQDVATVAGRPYRLEFSTGDAGDGCSGSLSLRAYAASGSVTVPHESQGRGGHKRGVLDFTATADRTRVAFVSMAYTMKSDGTLCGPVLDDVSLVGLHSRAARRFLL

SEQ ID NO: 27 - DNA, 1137 bp, Sorghum bicolor
atggcggagagcgggagctcacgtcgtggcgtgctgctgttcttgctcgtcggcgtggctgcggctggagtggcttcggccatccctgacgggctactgccaaacggtaacttcgagcaaggtccggacaagtcccagatgaacgggtccagggtgattggtcaaaactccataccctgctgggagacctcaggtttcgtggagtacatcgagcccgggcagcagcagaacgacatggtcctggtggtgcctgagggcgcacgggccgttcgcctcggcaacgacgcgaccatccggcagcagcttccaggcctgacccgcagcatgtcctactccatcaccttcagcgcggcgcgcacctgcgcccaggccgagcagctcaacgtgtccgtcgccgcggagtccggcgtcctccctgtccagaccgtgtacaccagcagcggctgggactcctactcctacgccttcaaggccaggcacaccgccgtgtggctcaccatccacaaccccggcgtcgaggaggacccggcgtgcggccccatcatcgattccgtcgccatcaaggccctccaccctcccagccgcgtcaaggacaatatgctgaagaacggagactttgaggagggcccgtacatgttcccggacttggcatggggcgtgctggtgccgccgatggacgaggacgacgtgtctccgctgccggggtggatgatcatgtcggacaccaaggccgtcaagtacctggacgcggcgcacttcgccgtgccgcacggcgcgtacgccgtggagctggtggccggcacggaggccgcgctggtgcaggaggtgcagaccaagcccgggcggtcatacaagctgtccttctccgtcggggacgcggccaacgggtgcgcgagcacgctgctcgtggacgcgtacgcggcgcggggcaggcagccggtctcgtacgagtcccacggcatgggcgggtgcgtgcgcagcgagttggagttcgcagcggtggcaaacctcacccgtgtggtgttccagagcatgggccactacatgaagcccgacgggacgctctgcgggccggtcgtggacgacgtctccctcgtcagcctgcccagacacgcagcccgccggttgctcatgtag

SEQ ID NO: 28 - protein, 378 aa, Sorghum bicolor
MAESGSSRRGVLLFLLVGVAAAGVASAIPDGLLPNGNFEQGPDKSQMNGSRVIGQNSIPCWETSGFVEYIEPGQQQNDMVLVVPEGARAVRLGNDATIRQQLPGLTRSMSYSITFSAARTCAQAEQLNVSVAAESGVLPVQTVYTSSGWDSYSYAFKARHTAVWLTIHNPGVEEDPACGPIIDSVAIKALHPPSRVKDNMLKNGDFEEGPYMFPDLAWGVLVPPMDEDDVSPLPGWMIMSDTKAVKYLDAAHFAVPHGAYAVELVAGTEAALVQEVQTKPGRSYKLSFSVGDAANGCASTLLVDAYAARGRQPVSYESHGMGGCVRSELEFAAVANLTRVVFQSMGHYMKPDGTLCGPVVDDVSLVSLPRHAARRLLM

SEQ ID NO: 29 - DNA, 1143 bp, Sorghum bicolor
atggcgggccgcacgaggtcacgttgccccgtgctgctgctcttcctcgtcggtgtggctgctcgagtggcttcaggcgtcgtcaccgacggcctattaccaaatggcaattttgagttcggaccggccaagtcggatctgaacggcactagggtaatgggtcaaaactccataccgaactgggagatctccgggttcgtggagtacatcgggtccgggcagcagcaggacgacatgatcctcccggtgccggaaggcgcatacgccgtgcgtctgggcaacgacgcaaccatccggcagaagctaagcgtgaaccggaagacgacctactccatcaccttctgcgcggcgcgcacctgcgcgcaggccgagcagctcaacgtgtccgtcgccgcggagtccggcgtcctcccggtccagaccgtgtacaccagcagcgggtgggactcctactcctacgccttcagagccaggcacagcaccgcgtggctcaccatccacaaccccagccacgaggacgacccggcgtgcggccccctcatcgactccgttgccatcaaggccctcaacccgccgcatcataccaagggtaacttgctgaggaacggagacttcgaggaggggccgttcatcttcccgggcacggcgtggggcgtgctggtgccgccgatggacgaggacgacgtgtcaccgctgccagggtggatggtcatgtcggacaccaaggtggtcaagtacgtggacgcggcgcaccacgcggtgccgcgcggcgcgcgcgccgtggagctggtggccggcagggaggccgcgctggtgcaggaggtccgcggcaccgtgcccggccggcgctaccgcttgtcgttctcggtcggggacgcggggaacgggtgcgaggggtccttggccgtggaggcgtacgcggcgcgggcgacggcgagggcgacgtacgagtcccgcggaaccggcgggagcataaagcgcgccgcggtcgtcgagttcgcggcgatcgcgaacctcacgcgcgtggtgtttcagagctacaaccaccacatgaagcccgacggcacgctctgcgggccggtcgtggacgacgtctccctcgtcggcctgcgcaagcacgccgcgcgccggctattcttgtag

SEQ ID NO: 30 - protein, 380 aa, Sorghum bicolor
MAGRTRSRCPVLLLFLVGVAARVASGVVTDGLLPNGNFEFGPAKSDLNGTRVMGQNSIPNWEISGFVEYIGSGQQQDDMILPVPEGAYAVRLGNDATIRQKLSVNRKTTYSITFCAARTCAQAEQLNVSVAAESGVLPVQTVYTSSGWDSYSYAFRARHSTAWLTIHNPSHEDDPACGPLIDSVAIKALNPPHHTKGNLLRNGDFEEGPFIFPGTAWGVLVPPMDEDDVSPLPGWMVMSDTKVVKYVDAAHHAVPRGARAVELVAGREAALVQEVRGTVPGRRYRLSFSVGDAGNGCEGSLAVEAYAARATARATYESRGTGGSIKRAAVVEFAAIANLTRVVFQSYNHHMKPDGTLCGPVVDDVSLVGLRKHAARRLFL

SEQ ID NO: 31 - DNA, 1116 bp, Sorghum bicolor
atggtcgctcgacgatccgtggcgttcgtcatactcctcatcgccgtggccgctcgagcggtttttgccatcaccgaaggcctgctaccaaacggtcattttgagcaaggaccagccaagtcggagatgaacggcaccagggtgctaggccgctactccataccgcactgggagatttcagggttcctggagtacatcgagtccggccagaaacaggacgacatgctcctccaggtcccggaaggcgagcgcgccgtgcggctgggcaacgacgccaccatccagcagcagctagcagtgacccggcacacgtactactccatcaccttctccgcgtcgcgcacctgcgcccaggccgagaagctgaacgtgtcggtcaccccggagtccggcgtcctccccatccagacggtgtacaccagcagcggctgggactcctactcctgggccttcaaggccaggcacagcaccgtgtggctctccatccacaaccccggccacgaggagaacccggcgtgcggccccctcatcgaccgcgtcgccgtcaagaccctccgctctccccatcacgtcaagaacaacatgttgaggaacggggacttcgaggacgggccctacatcttcgcggacacgccgtggggcgtgctggttccgccgatcacggaggacgagcactcgccgctgcctgggtggatgatcatgtcggacaccaaggtcgtcaagtacgtggacgcgccgcaccacgcggtgccgcgcggcgcgggcgccgtggagctggtcgccggcagggagtgcgcgctggtgcaggaggtgcgcaccgtgccccgccgctcgtacaagctgtccttcgccgtcggggacgcggccaacgggtgcgaagggaacctggccgtggacgtgtccgcggggcgcgccgcgaagctgaacgtgccgtacgagtcccacggcacgggcgggtacaagcgcgccgagctcgagttcgtggcgaccgacaatctgacgcgcgtcgtgttccagagcgccaaccactacaccaagtcggacgcgacgctctgcggccccatcatcgatgatgttcggctcgtccccgtgcacgcccgccggcggcgtatgtag

SEQ ID NO: 32 - protein, 371 aa, Sorghum bicolor
MVARRSVAFVILLIAVAARAVFAITEGLLPNGHFEQGPAKSEMNGTRVLGRYSIPHWEISGFLEYIESGQKQDDMLLQVPEGERAVRLGNDATIQQQLAVTRHTYYSITFSASRTCAQAEKLNVSVTPESGVLPIQTVYTSSGWDSYSWAFKARHSTVWLSIHNPGHEENPACGPLIDRVAVKTLRSPHHVKNNMLRNGDFEDGPYIFADTPWGVLVPPITEDEHSPLPGWMIMSDTKVVKYVDAPHHAVPRGAGAVELVAGRECALVQEVRTVPRRSYKLSFAVGDAANGCEGNLAVDVSAGRAAKLNVPYESHGTGGYKRAELEFVATDNLTRVVFQSANHYTKSDATLCGPIIDDVRLVPVHARRRRM

SEQ ID NO: 33 - DNA, 1020 bp, Triticum aestivum
atgcgttgcgccgtgctgctcctgctcgtcttcgcggcggcgcgcgccgccgcggtcgtcaccgacgggctcctgccgaatggcaacttcgagttgggtccggccaagtcggagctggtgaacggcacggtggtgaagggcggcaaggcgatccccaagtgggagacgtcgggcttcgtggagtacatcgagtccgggcacaagcagggcgacatgctgctggtggtgccgcagggcgcctacgccgtccgcctcggcaacgacgcctccatcctccagcgcatccccgtcgcccggggctcctactacgccatcaccttcagcgccgcccgcacctgcgcgcaggccgagcgcctcaacgtctccgtcagccccgagtccggcgtgctccccatgcagaccatctacggcagcaacggctgggactcctacgcctgggccttcaaggccaagctcgacgtcgtggagctcgtcatccacaaccccggcgtcgaggaggaccccgcctgcggcccgctcatcgacgccgtcgccatccgcacgctctacccgcccacgctctccaagggcaacatgctcaagaacggcggcttcgaggagggcccctacttcctccccaacgcctcctggggcgtgctcgtgccgcccaacatcgaggacgaccactccccgctccccgcctggatgatcatgtcctccaaggccgtcaagtacgtcgacgccgcgcacttcaaggtgcccgagggcgcccgcgccgtcgagctcgtcggcggcaaggagagcgcgctcgtccaggaggtgcgcaccgtgcctggctgggcctaccgcctctccttcgccgtcggcgactccgccgacgctgcaagggctccatggtggccgaggcctacgccgcgcgctccaccctcaaggtgccgtacgagtccaacggcgccggcggctacaagcgcgccgtgctggacttcgtcgccgtcagggaccgcacccgggtcgtcttccagagcgccttctaccacatga

SEQ ID NO: 34 - protein, 339 aa, Triticum aestivum
MRCAVLLLLVFAAARAAAVVTDGLLPNGNFELGPAKSELVNGTVVKGGKAIPKWETSGFVEYIESGHKQGDMLLVVPQGAYAVRLGNDASILQRIPVARGSYYAITFSAARTCAQAERLNVSVSPESGVLPMQTIYGSNGWDSYAWAFKAKLDVVELVIHNPGVEEDPACGPLIDAVAIRTLYPPTLSKGNMLKNGGFEEGPYFLPNASWGVLVPPNIEDDHSPLPAWMIMSSKAVKYVDAAHFKVPEGARAVELVGGKESALVQEVRTVPGWAYRLSFAVGDSADAARAPWWPRPTPRAPPSRCRTSPTAPAATSAPCWTSSPSGTAPGSSSRAPSTT

SEQ ID NO: 35 - DNA, 1146 bp, Zea mays
atgcgccgcgtcgcgctgttgctcgtcgccgccgtgtgcgcgctggcggcgccggctgccgcggtcgtcactgacggtcttctcccgaacggcaacttcgaggatggcccgcccaagtcggcgctggtgaacggcacggtggtgtcgggcgcccacgccatcccgcggtgggagacgtccggcttcgtggagtacatcgagtcggggcacaagcagggggacatgctgctggtggtgccgcagggcgcgcacgcggtgcggctgggcaacgaggcgtcgatccggcagcgcctggccgtggcgcgcggcgcctactacgccatcacgttcagcgcggcgcggacgtgcgcgcaggcggagcggcagcggctgaacgtgtcggtgagccccgagtggggcgtgctgccgatgcagaccatctacggcagcaacggctgggactcgtacgcctgggcattcaaggcgaagatggacgcggtgacgctggtcatccacaacccgggcgtggaggaggacccggcctgcggcccgctcatcgacggcgtcgccatccgtgcgctgtacccgcccgcgctcgccaggcgggcggggggaaacaacctgctcaagaacggcgggttcgaggagggcccctacttcctgcccggcgcgtcctggggcgtgctcgtcccgcccaacatcgaggacgaccactcgccgctccccgcctggatgatcgtctcgtccaaggccgtcaagtacgtggacgccgcgcacttcgccgtgccccagggcgcgcgcgccgtcgagctggtgggcggccgggagagcgcgctcgtgcaggaggtccgcaccgtgcctgggtggacctaccgcctcgccttcgccgtgggagactcgggcgacggctgcgcgggctccatggccgccgaggcctacgcggcgcgcgccacggtcaaggtgccctaccagtccaggggcaccggaggatacaagcgcgccgtgctggacttcacggccatcgccaaccgcacccgcgtcgtcttccagagcaccttctaccacatgaagcccgacggcacgctctgcggcccgctcgtcgacgacgcctcgctcgtcggcctgcgcaagaagaagcccgcgcgccgcctcatgcagctcctgtaa

SEQ ID NO: 36 - protein, 381 aa, Zea mays
MRRVALLLVAAVCALAAPAAAVVTDGLLPNGNFEDGPPKSALVNGTVVSGAHAIPRWETSGFVEYIESGHKQGDMLLVVPQGAHAVRLGNEASIRQRLAVARGAYYAITFSAARTCAQAERQRLNVSVSPEWGVLPMQTIYGSNGWDSYAWAFKAKMDAVTLVIHNPGVEEDPACGPLIDGVAIRALYPPALARRAGGNNLLKNGGFEEGPYFLPGASWGVLVPPNIEDDHSPLPAWMIVSSKAVKYVDAAHFAVPQGARAVELVGGRESALVQEVRTVPGWTYRLAFAVGDSGDGCAGSMAAEAYAARATVKVPYQSRGTGGYKRAVLDFTAIANRTRVVFQSTFYHMKPDGTLCGPLVDDASLVGLRKKKPARRLMQLL

SEQ ID NO: 37 - DNA, 1128 bp, Zea mays
atggaggggcgcgcgagctcacgtcgcggcgtgctgctgttcttgctcgtcggcgtggcttcggccaatcctgacgggctactaccaaacggcaacttcgagcaaggtccagacaagtaccagatgaacgggacctgggtgattggccgcaaatccataccctgctgggagatctcagggttcgtggagtacatcgtgtccgggcagcagcaggacaacggcatggtcgtggcggtgcccgagggcgcacgggccgtgcggctgggcaacgacgcgagcatccggcagcggcttacagggatgacccggggcacgtcctactccgtcaccttcagcgcgtcgcgcacctgcgcccaggccgagcagctgaacgtgtcggtcgccccggagtccggcgtcctccccatccagaccgtgtacaccagcagcgggtgggactcctactcctacgccttcagggccaggcactccgccgcgtggctcgtcatccacaaccccggcgtcgaggaggacccggcgtgcggccccgtcatcgactccgttgccatcaaggcactccaccctcccagtcgcaccgccaaggacaatatgctgaaaaacggagacttcgaggagggcccgtacgtgttcccggacaccccgtggggcgtgctggtgccgccgatggacgaggacgacgtgtccccgctgccggggtggacggtcatgtccgacaccaaggccgtcaagtacctcgacgcggcgcacttcgccgtgccgcgcggctcgcgcgccgtggagctggtggccggcacggaggccgcgctggtgcaggaggtgcggacgacacccgggcggtcctacacgctgtccttctccgccggggacgcggccgacgggtgcgcgggcgccctgcgcgtggacgcgtacgcggcgcggggcaggctgccggtctcgtacgagtcccgcggcacgggcgggttcgtgcgcaacgagctggagttcgccgcggtggcgaacctcacccgcgtcgtcttccagagcatgggccactacatgaagcccgacgggacgctctgcgggccggtcgtcgacgatgtctccctagtcgccgtgcacaaacacgctgcccgccggttgttcatgtag

SEQ ID NO: 38 - protein, 375 aa, Zea mays
MEGRASSRRGVLLFLLVGVASANPDGLLPNGNFEQGPDKYQMNGTWVIGRKSIPCWEISGFVEYIVSGQQQDNGMVVAVPEGARAVRLGNDASIRQRLTGMTRGTSYSVTFSASRTCAQAEQLNVSVAPESGVLPIQTVYTSSGWDSYSYAFRARHSAAWLVIHNPGVEEDPACGPVIDSVAIKALHPPSRTAKDNMLKNGDFEEGPYVFPDTPWGVLVPPMDEDDVSPLPGWTVMSDTKAVKYLDAAHFAVPRGSRAVELVAGTEAALVQEVRTTPGRSYTLSFSAGDAADGCAGALRVDAYAARGRLPVSYESRGTGGFVRNELEFAAVANLTRVVFQSMGHYMKPDGTLCGPVVDDVSLVAVHKHAARRLFM

SEQ ID NO: 39 - DNA, 1140 bp, Zea mays
atggacacccgtcgaagcatacatagtctatacaactacaacgaagcaagtacatttggccaagaaagacaaaacagcgatgcaaatacatgtgatggccgtggaatctacccagatctggttaaatgaagcccgagcattcgagttcgagcacactcacagccattcacattaacccatgaacgaatcttgtcggtagcatcacagaagcaagcggcgagcaggatggttccgcgtggagacaagcgagacgtcgtcgacgacgggtccgcagagcgtgccgtcgggcttcatgatgtagcccatgctgacgaacaccaccctggtctggtccgcgaccgccgcgaagtccagcacgccgcgcgtgtggccgcccttgccctgggactggtacggcaccttcacgctgccccgcgcggcgtacgcctggacggtcatggagcccacgcagccgttgccggcgtccccggccgagaactggagcctgtagagctgtccgggaacggtggccacgttctgcaccagcgctgtctccatgccggacaccagctccacggcgcgggcgccgtgcggcacggcgtggtgcggcgcgtccacgtacttcaccgacttggtggacgacaggaccatccacggggccagcggggagtagtcgtcctcgtccatcggcggcaccagcaccccccactgcgtgttggggaagatgtacgggccgtcctcgaagtccccgttcttcagcatattattcttgctgctccgaggagtcggcatggtcttaatggcaaacagatcgatgagggggccgcaggctgcgtcctcggcgacgccggggttgtggacgatcagggtgacgacgctgcccgcggcctggaaggcccaggagtaggagtcccagccgctgctggtgtagaccgtctggatcgggagtacgtccgactcgggggcgaccgtcacgttgagctgctcggcctgggcgcaggtgcgcgccgcgctgaaggtgatggagtagcgcgcgcccggcgtcacggcgagtcgctgctggatggatgcctcgttcccgagccgcacggcgtaggcgccctccggcaccggcagcagcatgtcgccctgcttctggcccgacccgatgtactccacgta

SEQ ID NO: 40 - protein, 379 aa, Zea mays
MGRGSDAVPDARRAALLLIVCLVARAASAIQDGLLPNGNFEEAPPKSQLNGTRVMGRNAIPHWEISGYVEYIGSGQKQGDMLLPVPEGAYAVRLGNEASIQQRLAVTPGARYSITFSAARTCAQAEQLNVTVAPESDVLPIQTVYTSSGWDSYSWAFQAAGSVVTLIVHNPGVAEDAACGPLIDLFAIKTMPTPRSSKNNMLKNGDFEDGPYIFPNTQWGVLVPPMDEDDYSPLAPWMVLSSTKSVKYVDAPHHAVPHGARAVELVSGMETALVQNVATVPGQLYRLQFSAGDAGNGCVGSMTVQAYAARGSVKVPYQSQGKGGHTRGVLDFAAVADQTRVVFVSMGYIMKPDGTLCGPVVDDVSLVSTRNHPARRLLL

SEQ ID NO: 41 - DNA, 1287 bp, Zea mays
atgcgtctgacgatcagcgcgaggccggtgagcctgagccccccaccgacagagcagcagaaccaacagactgcaacatctggtgctgcgctgccatgcaacgtgcaccctgccagtgtcagctcaaaagactgcaacatctgttgctcccaccggcccaccaccagacccatcacgatacatacaactgacacgaaatgcaatgcaaatggtgcaggtcttctcccgaacggcaacttcgaggatggcccgcccaagtcggcgctggtgaacggcacggtggtgtcgggcgcccacgccatcccgcggtgggagacgtccggcttcgtggagtacatcgagtcggggcacaagcagggggacatgctgctggtggtgccgcagggcgcgcacgcggtgcggctgggcaacgaggcgtcgatccggcagcgcctggccgtggcgcgcggcgcctactacgccatcacgttcagcgcggcgcggacgtgcgcgcaggcggagcggcagcggctgaacgtgtcggtgagccccgagtggggcgtgctgccgatgcagaccatctacggcagcaacggctgggactcgtacgcctgggcattcaaggcgaagatggacgcggtgacgctggtcatccacaacccgggcgtggaggaggacccggcctgcggcccgctcatcgacggcgtcgccatccgtgcgctgtacccgcccgcgctcgccaggcgggcggggggaaacaacctgctcaagaacggcgggttcgaggagggcccctacttcctgcccggcgcgtcctggggcgtgctcgtcccgcccaacatcgaggacgaccactcgccgctccccgcctggatgatcgtctcgtccaaggccgtcaagtacgtggacgccgcgcacttcgccgtgccccagggcgcgcgcgccgtcgagctggtgggcggccgggagagcgcgctcgtgcaggaggtccgcaccgtgcctgggtggacctaccgcctcgccttcgccgtgggagactcgggcgacggctgcgcgggctccatggccgccgaggcctacgcggcgcgcgccacggtcaaggtgccctaccagtccaggggcaccggaggatacaagcgcgccgtgctggacttcacggccatcgccaaccgcacccgcgtcgtcttccagagcaccttctaccacatgaagcccgacggcacgctctgcggcccgctcgtcgacgacgcctcgctcgtcggcctgcgcaagaagaagcccgcgcgccgcctcatgcagctcctgtaa

SEQ ID NO: 42 - protein, 428 aa, Zea mays
MRLTISARPVSLSPPPTEQQNQQTATSGAALPCNVHPASVSSKDCNICCSHRPTTRPITIHTTDTKCNANGAGLLPNGNFEDGPPKSALVNGTVVSGAHAIPRWETSGFVEYIESGHKQGDMLLVVPQGAHAVRLGNEASIRQRLAVARGAYYAITFSAARTCAQAERQRLNVSVSPEWGVLPMQTIYGSNGWDSYAWAFKAKMDAVTLVIHNPGVEEDPACGPLIDGVAIRALYPPALARRAGGNNLLKNGGFEEGPYFLPGASWGVLVPPNIEDDHSPLPAWMIVSSKAVKYVDAAHFAVPQGARAVELVGGRESALVQEVRTVPGWTYRLAFAVGDSGDGCAGSMAAEAYAARATVKVPYQSRGTGGYKRAVLDFTAIANRTRVVFQSTFYHMKPDGTLCGPLVDDASLVGLRKKKPARRLMQLL

SEQ ID NO: 43 - DNA, 1140 bp, Zea mays
atgggaaggggaagcgatgcagtgccggacgcccgtcgagctgcgctgctcttgatcgtctgcttggcggctcgagcggcttctgcgatccaggatggcctgttgccgaacggcaacttcgaggaggcgccgcccaagtcgcagctcaacggcacgagggtgatggggcgcaacgcgataccgcactgggagatctccgggtacgtggagtacatcgggtcgggccagaagcagggcgacatgctgctgccggtgccggagggcgcgtacgccgtgcggctggggaacgaggcatccatccagcagcgcctcgccgtgacgccgggcgcgcgctactccatcaccttcagcgcggcgcgcacctgcgcccaggccgagcagctcaacgtgacggtcgcccccgagtcggacgtactcccgatccagacggtctacaccagcagcgggtgggactcctactcctgggccttccaggccgcgggcagcgtcgtgaccctgatcgtccacaaccccggcgtcgccgaggacgcagcctgcggccccctcatcgatctgtttgccattaagaccatgccgactcctcggagcagcaagaataatatgctgaagaacggggacttcgaggacggtccgtacatcttccccaacacgcagtggggggtgctggtgccgccgatggacgaggacgactactccccgctggccccgtggatggtcctgtcgtccaccaagtcggtgaagtacgtggacgcgccgcaccacgccgtgccgcacggcgcccgcgccgtggagctggtgtccggcatggagacagcgctggtgcagaacgtggccaccgttcccggacagctctacaggctccagttctcggccggggacgccggcaacggctgcgtgggctccatgaccgtccaggcgtacgccgcgcggggcagcgtgaaggtgccgtaccagtcccagggcaagggcggccacacgcgcggcgtgctggacttcgcggcggtcgcggaccagaccagggtggtgttcgtcagcatgggctacatcatgaagcccgacggcacgctctgcggacccgtcgtcgacgacgtctcgcttgtctccacgcggaaccatcctgctcgccgcttgcttctgtga

SEQ ID NO: 44 - protein, 379 aa, Zea mays
MGRGSDAVPDARRAALLLIVCLAARAASAIQDGLLPNGNFEEAPPKSQLNGTRVMGRNAIPHWEISGYVEYIGSGQKQGDMLLPVPEGAYAVRLGNEASIQQRLAVTPGARYSITFSAARTCAQAEQLNVTVAPESDVLPIQTVYTSSGWDSYSWAFQAAGSVVTLIVHNPGVAEDAACGPLIDLFAIKTMPTPRSSKNNMLKNGDFEDGPYIFPNTQWGVLVPPMDEDDYSPLAPWMVLSSTKSVKYVDAPHHAVPHGARAVELVSGMETALVQNVATVPGQLYRLQFSAGDAGNGCVGSMTVQAYAARGSVKVPYQSQGKGGHTRGVLDFAAVADQTRVVFVSMGYIMKPDGTLCGPVVDDVSLVSTRNHPARRLLL

SEQ ID NO: 45 - DNA, 1194 bp, Zea mays
atggcgatcgatgagcggagcgtgcacggcggcgccgcactggtcctgcggctgctggtctgcgtcgtcgcggcgcgggctgtctcggccgtcgccgatggtcctctgctgaacggcaacttcgaggacccgccgaaccagtcccagatgagcgggtcggtggtgaccggggagcacgcggtctcctactggaagacgtccggccacatcgagttcatatgctccggccagaagcagggggacatggtcctgacggtgccggacggctcgcacgcgctgcggctgggcagcggcgcctccatccagcagcagatcagcctcacgaagggcctgtactactccctcacgttcagcgcgtcgcgcacctgctcccagaacgagatgctcaacgtgacggccgcccccgtgtccggctcccccgcccagaccggcgagctccccacccagacggtgtacaccagcagcggctgggactcctactcctgggccttcagggcggaggccggtctcatgtccatcacagtcacccacaactgcggagaagaggaagatcccgcgtgcggccccatcgtcgacgcctttgccatcaagacgctcagccagcctgaggccagccagaataacatgctgaggaacggggacttcgaggagggcccgtacatcccgccggactcgcagtggggagtgctggtgccgccggtggacgaggacgacgtctccccgctgcccgggtggaatatcatggcgtacaagaagtcggtcaagtacatagactcggcgcacttcgcggtgccgcgcggcgcgcgcgccgtggagctggtgtccggcgtggagaccgcgctcctgcaggaggtgtacaccaccgtggaagggagctggtacaggctggagttctcggccggggacgccgacgggtgcgcgtcgtcgtatgatgacggctcctcgtccgggatgaaggtgaaggcgtacgcggggacggccgaaacgaccgtggacgtcgatttccgcgacgccggcggttccaagcgcgggaagatcgagttcagggccaccgccagccccaccagggtggtgttcgtcagcttgggctaccacaccaagtccgacaacagcggcacgctctgcggtcccgtcgtagacgacgtctcgcttgtccccataccgcagccgtatgctcgccgcctgcttctataa

SEQ ID NO: 46 - protein, 397 aa, Zea mays
MAIDERSVHGGAALVLRLLVCVVAARAVSAVADGPLLNGNFEDPPNQSQMSGSVVTGEHAVSYWKTSGHIEFICSGQKQGDMVLTVPDGSHALRLGSGASIQQQISLTKGLYYSLTFSASRTCSQNEMLNVTAAPVSGSPAQTGELPTQTVYTSSGWDSYSWAFRAEAGLMSITVTHNCGEEEDPACGPIVDAFAIKTLSQPEASQNNMLRNGDFEEGPYIPPDSQWGVLVPPVDEDDVSPLPGWNIMAYKKSVKYIDSAHFAVPRGARAVELVSGVETALLQEVYTTVEGSWYRLEFSAGDADGCASSYDDGSSSGMKVKAYAGTAETTVDVDFRDAGGSKRGKIEFRATASPTRVVFVSLGYHTKSDNSGTLCGPVVDDVSLVPIPQPYARRLLL

SEQ ID NO: 47 - DNA, 1227 bp, Zea mays
atggtgatcgataggcggagcgtgcagcgcgccgcgctggtcgtcctgccgctggtgctcttcgtcgcggcgcgggctgtctctgccgtcggcgatggtcctctgcagaacggcaacttcgaggactcgccagaccagtcccagatgagcggctcggtggtggccggggagcacgcgatctccggctggaagacgtccggccacatcgagctcgtatgctcgggccagaagcagggggacatggtcctgacggtgccggacggcgcgcaggccctgcggctgggagccggcgcctccatcgagcagcagatcagcggcctcacgcagggctcgtactactccctcacgttcgccgcgtcgcgcacctgctcccaggacgagacgctcagcgtgacggccgcccccgcgccgtccggcgccggctccccggcgccggcccagaccggcgaactccccatgcagacggtgtacaccagcatcggctgggactcctactcctgggccttcagggcggagggcgccggcctcatgtccgtcgtaatcacccacaactgcgggcaggaggaagaccccgcgtgcggccccatcgtcgacgccttcgccatcaaggcgctccacgaccagccgcctgaccaggcggcggcggacaacaacatgctgcggaacgggggcttcgaggagggcccgtacatcccgccgggctcgccgtggggggtgctggtgccgccggtggacgaggaccccgtctccccgctgcccgggtggaaggtcatggcgtacaagaagtccgtcaggtacgtagactcggcgcacttcgcggtgccgcgcggcgcgcgcgccgtggagctcgtgtccggcgtcgaagccgcgctcctgcaggaggtggacaccaccgtggaagggagctggtacaggctcgagttctcggccggggacgccgccaacggctgcgcctcgtcgtctgatggttcctcgtcgtccgggatgaagctcaaggcgtacgccgggacgagtgaaaccaccgtggacatcgatttccgcggcgctggcggttccaaccgagggaagatcgagttcagggccgccgcgagccccaccagggtggtgttcgtcagcctgggctaccacaccaagtccgacaacagcggcacgctctgcgggcccgtcgtagacgacgtctcgctcgtccccataccgccgccgtatgctcgccggctgcttctctag

SEQ ID NO: 48 - protein, 408 aa, Zea mays
MVIDRRSVQRAALVVLPLVLFVAARAVSAVGDGPLQNGNFEDSPDQSQMSGSVVAGEHAISGWKTSGHIELVCSGQKQGDMVLTVPDGAQALRLGAGASIEQQISGLTQGSYYSLTFAASRTCSQDETLSVTAAPAPSGAGSPAPAQTGELPMQTVYTSIGWDSYSWAFRAEGAGLMSVVITHNCGQEEDPACGPIVDAFAIKALHDQPPDQAAADNNMLRNGGFEEGPYIPPGSPWGVLVPPVDEDPVSPLPGWKVMAYKKSVRYVDSAHFAVPRGARAVELVSGVEAALLQEVDTTVEGSWYRLEFSAGDAANGCASSSDGSSSSGMKLKAYAGTSETTVDIDFRGAGGSNRGKIEFRAAASPTRVVFVSLGYHTKSDNSGTLCGPVVDDVSLVPIPPPYARRLLL

SEQ ID NO: 49 - DNA, 1140 bp, Oryza sativa
atggcggccggctcggcgtcgctgctgctgctaatggtggtgctctgcgcggcggcgagcggaacggcgctcgccgccatcaccgacgggctgctggcgaacggcaacttcgagcgcgggccggcgccgtcgcagctgcgcgggacgcgggtggtcggcgcgtcggcgatcccgtcgtggcggacgtcggggttcgtggagtacatcccgtcggggaggaagcagggggacatggtgctggtggtccccgaggggagccacgcggtgcggctcgggaacgaggcgtcgatccggcagcggctcgccggcgcggcgcgcggcgcgcggtacgcgctcacgttcagcgcggcgcggacgtgcgcgcaggcggagcggctgaacgtgtcggcgtcggggcagtgggcggtgctccccatgcagaccatgtacagcagcaacggctgggactcgtacgcctgggcctgggatgccgccgccgacgcgttcgacgtcgtcatccacaaccccggcgtcaccgaggaccccgcctgcggccccctcatcgactccgtcgccatccgcaccctcaaccctcctcgccgcaccaacaagaacctggtgaagaacggggacttcgaggagggcccgtacatcatcccggggactaggtggggggtgctgatcccgtccatggtggtggacgagcactcgccgctgccggggtggatggtggagtcgctcaaggcggtgaagtacatcgacagcgaccacttcgcggtgccgcgcgggcggcgcgctgtcgagctgctggcggggcgggagagcgcgatcgcgcaggtgatccgcaccgtccccgggaggcagtacgcgctgtcgttcaccgtcggcgacgccagcaacggctgcgaggggtcgctggtggtggaggcgtacgccgggagggagtccaccagggtggcgcacgagtcggctggccgcggcggcgccgccaagcgcgccgtgctgccgttccgcgccgccgcggcgcgcacccgcgtcgtgttcttcagctcgttctacagcaccaggagcgacgacatgagctcgctctgcgggccggtgatcgacgacgtcgccgtcgtcagcgtgcgcgcgcggcggccggcggcgaagcgcggctag

SEQ ID NO: 50 - protein, 379 aa, Oryza sativa
MAAGSASLLLLMVVLCAAASGTALAAITDGLLANGNFERGPAPSQLRGTRVVGASAIPSWRTSGFVEYIPSGRKQGDMVLVVPEGSHAVRLGNEASIRQRLAGAARGARYALTFSAARTCAQAERLNVSASGQWAVLPMQTMYSSNGWDSYAWAWDAAADAFDVVIHNPGVTEDPACGPLIDSVAIRTLNPPRRTNKNLVKNGDFEEGPYIIPGTRWGVLIPSMVVDEHSPLPGWMVESLKAVKYIDSDHFAVPRGRRAVELLAGRESAIAQVIRTVPGRQYALSFTVGDASNGCEGSLVVEAYAGRESTRVAHESAGRGGAAKRAVLPFRAAAARTRVVFFSSFYSTRSDDMSSLCGPVIDDVAVVSVRARRPAAKRG

SEQ ID NO: 51 - DNA, 1116 bp, Panicum virgatum
atgggaaggtcatccatggctgggccggcgatgcttctgctgctctgcacagtgtgcagactggcgctcggaattactgacgggctgctcccgaacggcaacttcgagcgcgggccggtgccgtcgcagctgcgggggacgcgggtgctgggctcgtcggcgatcccgtcgtggcagacgtcggggttcgtggagtacatcccgtcggggaagaagcagggggacatgctgctggtggtgccggagggcgcctacgccgtgcggctcgggaacgaggcgtcgatccgacagcggctccgcggcgccgcccgcggcgcgcgctactcgctgacgttcagcgcggcgcggacgtgcgcgcaggcggagcagctcaacgtgtcggcgtccgggcagtcgggcctgctggccatgcagaccatgtacagcagcaacgggtgggactcgtacgcctgggcctgggtcgccgacgctggcgaggtcgacgtcgtcatccacaaccccggcgtcaccgaggaccccgcctgcggcccgctcatcgactccgtcgccatcaagacgctcaacccgccgcgccgcacgaacaggaacctggtgaagaacggcgacttcgaggagggcccgtacatcatcccggggaccaggtggggcgtgctgatcccgtcgcgcgtggtggacgaccactcgccgctgcccgggtggatggtggagtcgctcaaggccgtcaagtacatcgacggcggcagcttcgcggtgccgcgggggcggcgcgccgtggagctgctggcggggagggagagcgcggtggcgcaggtgatccgcaccgtgccggggcggcgctacgcgctgtccttcacggtgggggacgccggcaacgcctgccgcgggtcgctcatggtggaggcctacgcggggcgggagtccaccaaggtggcgtacgagtcggcggggaagggcggcgtgaagcgcgccgtgctgccgttccgcgctgcctccgcgcgcacgcgcatcgtcttcttcagctccttctacagcaccaggagcgacgacctcagctcgctctgcgggcccgtcctcgacgacgtcgccgtcgtcagcgtgcgggcgaagcgcggctag

SEQ ID NO: 52 - protein, 371 aa, Panicum virgatum
MGRSSMAGPAMLLLLCTVCRLALGITDGLLPNGNFERGPVPSQLRGTRVLGSSAIPSWQTSGFVEYIPSGKKQGDMLLVVPEGAYAVRLGNEASIRQRLRGAARGARYSLTFSAARTCAQAEQLNVSASGQSGLLAMQTMYSSNGWDSYAWAWVADAGEVDVVIHNPGVTEDPACGPLIDSVAIKTLNPPRRTNRNLVKNGDFEEGPYIIPGTRWGVLIPSRVVDDHSPLPGWMVESLKAVKYIDGGSFAVPRGRRAVELLAGRESAVAQVIRTVPGRRYALSFTVGDAGNACRGSLMVEAYAGRESTKVAYESAGKGGVKRAVLPFRAASARTRIVFFSSFYSTRSDDLSSLCGPVLDDVAVVSVRAKRG

SEQ ID NO: 53 - DNA, 1095 bp, Sorghum bicolor
atggccgtgccagtgatgcttctgctgctgtgcgcaacgtgcagactggcgcttggaattactgacggtctgctcccgaacggcaacttcgagcggggcccggcgccgtcgcagctgcgcgggacgcgggtgatgggctcgtcggcgatcccggcgtggcagacgtcggggttcgtggagtacatcccgtcggggcggaagcagggggacatggtgctggtggtgcccgagggcgcctacgccgtgcggctcgggaacgaggcctccatccggcagcggctccacggcgccgcccgcggcgcgcgctactcgctcacgttcagcgcggcgcggacgtgcgcgcaggcggagcagctcaacgtgtcggcgtcggggcagtcgggcctgctggcgatgcagaccatgtacagcagcaacggctgggactcgtacgcctgggcctgggtggccgacgccgacgaggtcgacgtcgtcatccacaaccccggcgaccccgcctgcggcccgctcatcgactccgtcgcgatcaagacgctcaacccgcctcgccggaccaacaagaacctggtgaagaacggcgacttcgaggagggcccgtacatcatcccggggacgaaatggggcgtgctgatcccgtcgagggtggtggacgaccactcgccgctgcccgggtggatggtggagtcgctcaaggccatcaagtacatcgacagcgacagcttcgcggtgccgcggggccggcgcgccgtggagctgctggccgggagggagagcgccatcgcgcaggtgatccgcaccgtgccggggcggcagtacgcgctgtccttcaccgtcggcgacgccagcaacgcctgccgtgggtcgctcatggtggaggcatacgccggccgggagtccaccaaggtggcgtacgagtcggcggggaagggcggcgtcaagcgcgccgtgctgccgttccgcgccgcgtccgcgcgcaccaggctcgtcttcttcagctccttctacagcaccaggagcgacgacctcagctcgctctgcgggccagtgctcgacgacgtcgccgtcgtcagcgtgcgcactaccaagcgcggctag

SEQ ID NO: 54 - protein, 364 aa, Sorghum bicolor
MAVPVMLLLLCATCRLALGITDGLLPNGNFERGPAPSQLRGTRVMGSSAIPAWQTSGFVEYIPSGRKQGDMVLVVPEGAYAVRLGNEASIRQRLHGAARGARYSLTFSAARTCAQAEQLNVSASGQSGLLAMQTMYSSNGWDSYAWAWVADADEVDVVIHNPGDPACGPLIDSVAIKTLNPPRRTNKNLVKNGDFEEGPYIIPGTKWGVLIPSRVVDDHSPLPGWMVESLKAIKYIDSDSFAVPRGRRAVELLAGRESAIAQVIRTVPGRQYALSFTVGDASNACRGSLMVEAYAGRESTKVAYESAGKGGVKRAVLPFRAASARTRLVFFSSFYSTRSDDLSSLCGPVLDDVAVVSVRTTKRG

SEQ ID NO: 55 - DNA, 1116 bp, Zea mays
atgggaaggctagccctggctgtgccggtgatgcttctgctgctttgcacgacgtgcagactgacgctcggaattacagacggtctgctcccgaacggcaacttcgagcggagcccgctgccgtcgcagctgcgggggacccgggtggtgggcgcgtcggcgatcccgtcgtggcagacgtcggggttcgtggagtacatctcgtcggggcagaagcagggtgacatggtgctggtggtgcccgagggcgcctacgccgtgcggctcgggaacgaggcgtccatccggcagcggctccggggcgccgcccgcggcgcgcgctactcgctcacgttcagcgcggcgcggacgtgcgcgcaggcggagcagctgaacgtttctgcgtcggggcagtcgggcctgctggccatgcagaccatgtacagcagcaacgggtgggactcgtacgcctgggcctgggtcgccaacgccgacgaggtcgacatcgtcatccacaaccccggcgtcaccgaggaccccgcctgcggcccgctcatcgattccgtcgccatcaagacgctcaacccgcctcgtcgcaccaacaagaacttggtcaagaatggtgacttcgaggagggcccgtacatcatcccggggaccaagtggggcgtgctgatcccatcgcgcgtggtggaggaccattcgccgcttccggggtggatggtggagtcgctcaaggccatcaagtacatcgacggcgagagcttcgccgtgccgcggggtcggcgcgccgtggagctgctggccgggagggagagcgcgatcgcgcaggtcatccgcaccgtgccggggcgacagtacgtgctgtccttcaccatcggcgacgccagtaacgcctgccgcggctcgctcatggtggaggcatacgcgggccgggagtccaccaaggtggcgtacgagtcggcggggaagggcggcgtgaagcgcgccgtgctgccgttccgcgccgcgtcggcgcgcaccaggctcgtctttttcagctccttctacagcaccaggagcgacgacctcagctcgctatgcgggccagtgcttgatgacgtcgtcgtcgtcagcgtgcgcacgaagcgcggctag

SEQ ID NO: 56 - protein, 371 aa, Zea mays
MGRLALAVPVMLLLLCTTCRLTLGITDGLLPNGNFERSPLPSQLRGTRVVGASAIPSWQTSGFVEYISSGQKQGDMVLVVPEGAYAVRLGNEASIRQRLRGAARGARYSLTFSAARTCAQAEQLNVSASGQSGLLAMQTMYSSNGWDSYAWAWVANADEVDIVIHNPGVTEDPACGPLIDSVAIKTLNPPRRTNKNLVKNGDFEEGPYIIPGTKWGVLIPSRVVEDHSPLPGWMVESLKAIKYIDGESFAVPRGRRAVELLAGRESAIAQVIRTVPGRQYVLSFTIGDASNACRGSLMVEAYAGRESTKVAYESAGKGGVKRAVLPFRAASARTRLVFFSSFYSTRSDDLSSLCGPVLDDVVVVSVRTKRG

SEQ ID NO: 57 - DNA, 1116 bp, Arabidopsis lyrata
atgtaccattaccaagaagcagcactcctcgtagccctcctcttcgtttcttcgaatgtcgtcgtatcggccccaatccgcgatggtttattaccaaacggtaacttcgagttgggtcctaaaccctcccaattgaaaggatccgtggttaaggaacgaaccgccgtaccaaactgggacataaccggttttgtggagtacatcaaatccggtcagaaacaagacgacatggtcttggtcgtaccgcagggttcctccgccgttcgcttaggcaacgaagcctcgatctcccagaaaatctccgtcttacccggccgtctgtactcaatcacgttcagcgccgctagaacatgtgctcaagacgagaaactcaatatctccgtgacacacgagtcaggtgtgatccctatccagacaatgtacggcagtgatggttgggactcatacgcatgggcttttaaagctggtggccccgaaatccatatccggttccataacccgggtgttgaagagcacccggcttgtggaccgttgatcgacgccgtggctatcaaggctttgttccctcccagattctctggatacaatctgataaagaatgggaacttcgaagaaggaccttacgtgttccccacggcaaaatcgggagtactgatcccaccgttcatcgaggacgataacagcccattgcccggttggatgatcgagtctctcaaggccgttaagtacgtagacaaagcacacttcgctgtccccgaaggacaccgagccattgagcttgttggaggcaaagagagcgccatttctcagattgtaaggacgtcactgaacaaattctacgccctcacgttcagcgtcggagacgccagagacggttgtgagggaccgatgacagtggaggcgttcgctggacaaggcaaggtcatggtggattacgcgtctaaagggaaaggcgggtttagacgtgggaggcttgtgttcaaggcggtatcggccaggacacgtgtcactttcttgagcacgttttatcatatgaagagtgatcactctggctcgctatgtggtccggtgatcgatgacgtcaggctggtggcggttcggaaactccgaggatga

SEQ ID NO: 58 - protein, 371 aa, Arabidopsis lyrata
MYHYQEAALLVALLFVSSNVVVSAPIRDGLLPNGNFELGPKPSQLKGSVVKERTAVPNWDITGFVEYIKSGQKQDDMVLVVPQGSSAVRLGNEASISQKISVLPGRLYSITFSAARTCAQDEKLNISVTHESGVIPIQTMYGSDGWDSYAWAFKAGGPEIHIRFHNPGVEEHPACGPLIDAVAIKALFPPRFSGYNLIKNGNFEEGPYVFPTAKSGVLIPPFIEDDNSPLPGWMIESLKAVKYVDKAHFAVPEGHRAIELVGGKESAISQIVRTSLNKFYALTFSVGDARDGCEGPMTVEAFAGQGKVMVDYASKGKGGFRRGRLVFKAVSARTRVTFLSTFYHMKSDHSGSLCGPVIDDVRLVAVRKLRG

SEQ ID NO: 59 - DNA, 1080 bp, Arabidopsis lyrata
atgaaaaagattcaatctttgtctctagatctaagatttatctctctgtttacttcttcaggatatcttcgtaatggaaacttcgaagagtcaccaaagaaaaccgacatgaaaaaaacagttctaatcggcaaaaccgccttgcccgaatgggaaatcaccggtttcgtcgagtacatcgccggcggtcctcagccgggaggcatgttttttccggtggctcatggagtccacgccgtgaggctcggaaacgaagccacaatctctcagaagttagaagtgaagccaggttctctctacgcactcacgtttggtgcgtcgagaacttgtgcacaagacgaggttcttagagtctctgtgccttctcagtccggtgacttgccgcttcaaacactttacaacagcttcggaggtgacgtgtacgcttgggccttcgtcgctaagacttctcaagttactgtgactttccataatcctggagttcaagaagatcctgcttgtggtcctttgttggacgctgtcgccattaaagagcttgttcatccaatctacaccaaagggaacttggtgaagaacggagggttcgaagaaggtcctcaccgtcttgtgaactccacacaaggagtcctactcccacctaaacaagaagatctcacatcacctttacctggttggatcatagagtcactcaaggcagtgaaattcatagactctaagtactttaatgtcccctttggacatgctgctatcgagctcgttgcaggcaaagaaagtgccattgcacaagtcattagaacttctccaggtcaaacttacaccctctccttcgtcgttggagatgctaagaatgactgccatggttccatgatggttgaagcttttgcagccaaggataccctcaaagtaccacacacttccgttggtggaggtcattttaagaccgcaagtttcaagttcaaggcggttgaggcaagaactagaattactttcttcagtggtttttaccataccaagaagactgatattggatctctatgtggtcctgtcattgacgagattgtggtttctcatgtcgcttag

SEQ ID NO: 60 - protein, 359 aa, Arabidopsis lyrata
MKKIQSLSLDLRFISLFTSSGYLRNGNFEESPKKTDMKKTVLIGKTALPEWEITGFVEYIAGGPQPGGMFFPVAHGVHAVRLGNEATISQKLEVKPGSLYALTFGASRTCAQDEVLRVSVPSQSGDLPLQTLYNSFGGDVYAWAFVAKTSQVTVTFHNPGVQEDPACGPLLDAVAIKELVHPIYTKGNLVKNGGFEEGPHRLVNSTQGVLLPPKQEDLTSPLPGWIIESLKAVKFIDSKYFNVPFGHAAIELVAGKESAIAQVIRTSPGQTYTLSFVVGDAKNDCHGSMMVEAFAAKDTLKVPHTSVGGGHFKTASFKFKAVEARTRITFFSGFYHTKKTDIGSLCGPVIDEIVVSHVA

SEQ ID NO: 61 - DNA, 1122 bp, Arabidopsis lyrata
atgggccgtttggttattaacggcgacttcgaaacatcaccgtcacatggcttccctgacgacggagtaaccgacgggccatcagatatcccaagctggaaatccaacggtacggtggagctaatcaactccggtcaaaaacaaggcggaatgatcctcattgtcccacaaggtcgtcacgccgtccgattaggcaacgacgcagagatcagccaagatctaacggttgagaaaggttttgtctattcagtgactttcagtgcagctcgcacgtgcgctcagctcgaatcgataaacgtgtcggtggcgtctgtgaacgcagacgcggatgatatggttgcgtcgcgtaacgtggatttgcaaacgttgtatagtgttcaagggtgggatccttacgcgtgggcgtttgaagcggaagatgatcatgtacggttggtttttaaaaacccgggtatggaagatgacccgacttgtggaccaatcatcgatgacattgctattaagaagctctttactcctgataaacccaaagacaatgcggtgattaatggagatttcgaagaaggtccatggatgtttaggaacacgtctcttggtgttttacttccgacaaacctcgacgaagaaacctcgtctcttccaggttggactgttgaatcgaacagggcggttcggtttgttgactcggatcacttctcagttccaggtggaaaacgagccgtcgaactactctcaggcaaagaaggcattatttcacaaatggttgagaccaaagcagataaaccgtacacattaactttctcgctaggacacgcaggtgataaatgcaaggaaccattggctataatggcattcgcaggtgatcaggcgcagaactttcattacatggcgcaagcgaactctagtttcgaaaaggccggtttgaatttcacggctaaggctgatcgaaccagagtcgcgttctacagtgtttattacaatacgaggactgatgatatgagctccttgtgtggacctgtgatcgatgacgttagagtttggttctcagggtcgaagagaatcggagctggatttgggtttgggttttcggtttttgttcttcttgctatcgttttggtttag

SEQ ID NO: 62 - protein, 373 aa, Arabidopsis lyrata
MGRLVINGDFETSPSHGFPDDGVTDGPSDIPSWKSNGTVELINSGQKQGGMILIVPQGRHAVRLGNDAEISQDLTVEKGFVYSVTFSAARTCAQLESINVSVASVNADADDMVASRNVDLQTLYSVQGWDPYAWAFEAEDDHVRLVFKNPGMEDDPTCGPIIDDIAIKKLFTPDKPKDNAVINGDFEEGPWMFRNTSLGVLLPTNLDEETSSLPGWTVESNRAVRFVDSDHFSVPGGKRAVELLSGKEGIISQMVETKADKPYTLTFSLGHAGDKCKEPLAIMAFAGDQAQNFHYMAQANSSFEKAGLNFTAKADRTRVAFYSVYYNTRTDDMSSLCGPVIDDVRVWFSGSKRIGAGFGFGFSVFVLLAIVLV

SEQ ID NO: 63 - DNA, 1203 bp, Arabidopsis lyrata
atggtgctatacaactacagtacttggagattggtttccattttaatacttctacttggtctctccatcgtcgccgccgcagactccgccggcaaaactttaccggtcgaagacggcttggtaattaacggcgactttgagactccaccgtcaaacggcttccctgatgacgcaatcatcgaggactcctccgagataccgagctggcgatccgatggcacggtggagctaatcaaatccggtcaaaagcaaggcgggatgatcttgatcgtgcccgagggtcgtcacgccgtcagattaggaaacgatgcagaaatcagccaagaacttcccgtagagaaaggctctatctactctgtcacgttcagtgccgcccgcacatgtgcacagctcgagtcgctgaatgtgtcagtggcttccaatgaacccatagcatcacagaccattgacttgcaaacggtctacagcgttcaagggtgggatccatatgcatgggcgtttgaagcagtggttgatcgcgtccggttggtttttaggaaccctggcatggaggatgatcctacttgtggacctatcattgacgacatcgccgttaagaagctctttactcctgataaaaccaaaggcaatgcagtgattaatggagattttgaagaaggtccatggatgttcaggaacacgacattaggtgttcttcttccgacaaacctcgacgaagaaatatcgtctcttcccggatggaccgtcgaatcaaaccgagcggtccggtttattgactcagaccatttctcggtccctgagggaaagcgagctttggagcttctatcgggcaaagaaggcataatttctcaaatggttgagacaaaggcgaacattccgtacaagctgtctttctcattgggacacgcaggggacaagtgtaaggaacctttggccgtaatggcttttgccggagatcaagcacagaactttcattatatggcgcaggcgaactctagtttcgaaagatcggagttgaacttcacggcgaaagctgaacgaacgaggatcgccttctacagcatttattacaatacgaggacggacgacatgagttcactgtgtggacctgtgattgatgacgttaaggtttggttctccgggtctagtagaattggatttggttttccagtttttattcttctttcattggttttcatctag

SEQ ID NO: 64 - protein, 400 aa, Arabidopsis lyrata
MVLYNYSTWRLVSILILLLGLSIVAAADSAGKTLPVEDGLVINGDFETPPSNGFPDDAIIEDSSEIPSWRSDGTVELIKSGQKQGGMILIVPEGRHAVRLGNDAEISQELPVEKGSIYSVTFSAARTCAQLESLNVSVASNEPIASQTIDLQTVYSVQGWDPYAWAFEAVVDRVRLVFRNPGMEDDPTCGPIIDDIAVKKLFTPDKTKGNAVINGDFEEGPWMFRNTTLGVLLPTNLDEEISSLPGWTVESNRAVRFIDSDHFSVPEGKRALELLSGKEGIISQMVETKANIPYKLSFSLGHAGDKCKEPLAVMAFAGDQAQNFHYMAQANSSFERSELNFTAKAERTRIAFYSIYYNTRTDDMSSLCGPVIDDVKVWFSGSSRIGFGFPVFILLSLVFI

SEQ ID NO: 65 - DNA, 1224 bp, Arabidopsis thaliana
atggttccgagcaacaatagatgcaaatggagttccattttcttgtttctgctcagtgtctccgttgccgtcttagtcgccgtcgctgacgacaagtctccggcggttgaggatggtttagtgatcaacggcgacttcgaaacatcaccgtcaagtggctttcctgacgacggagtaactgacggaccatccgatatcccaagctggaaatccaacggtacggtggagctaataaattccggtcaaaaacaaggcggaatgatcctcattgtcccacaaggccgtcacgccgtccgattagggaacgacgcagagatcagccaagatctaacggttgagaaaggttttgtctattcagtcacgttcagcgctgctcgcacgtgcgctcaactcgaatcgataaacgtgtcggtagcgtctgtgaacgcagacgcggacgatatgctggcgtcgcggaacgttgatttgcaaacgctttatagcgttcaagggtgggacccttatgcgtgggcgtttgaagcggaagatgatcatgtacggttggtttttaagaatccgggtatggaagatgatccgacttgtggaccaatcatcgatgacattgctattaagaagctctttactcctgataaacccaaagataatgcggtgattaatggagatttcgaagatggtccatggatgtttaggaacacgtctcttggtgttttacttccgacaaacctcgacgaagaaatctcgtctcttcctggttggactgttgaatcgaacagagcggttcggtttgttgactcggatcacttctctgttccaaagggcaaacgagccgtcgagctactctcaggcaaagaaggaattatttcacaaatggttgagaccaaagcagataagccgtacatattgtctttctcactaggccacgcaggtgataaatgcaaggaaccattggctattatggcattcgcaggtgatcaggcgcagaactttcattacatggcgcaagcgaactccagtttcgaaaaggccggtttgaatttcacggctaaggctgatcgaaccagagttgcgttctacagtgtttattacaatacgaggactgatgatatgagctccttgtgtggacctgtgatcgatgacgttagagtgtggttctccgggtcgaagagaatcggagctgggtttgggttttgggtttttgttcttctcgttgtcggtttggtttaa

SEQ ID NO: 66 - protein, 407 aa, Arabidopsis thaliana
MVPSNNRCKWSSIFLFLLSVSVAVLVAVADDKSPAVEDGLVINGDFETSPSSGFPDDGVTDGPSDIPSWKSNGTVELINSGQKQGGMILIVPQGRHAVRLGNDAEISQDLTVEKGFVYSVTFSAARTCAQLESINVSVASVNADADDMLASRNVDLQTLYSVQGWDPYAWAFEAEDDHVRLVFKNPGMEDDPTCGPIIDDIAIKKLFTPDKPKDNAVINGDFEDGPWMFRNTSLGVLLPTNLDEEISSLPGWTVESNRAVRFVDSDHFSVPKGKRAVELLSGKEGIISQMVETKADKPYILSFSLGHAGDKCKEPLAIMAFAGDQAQNFHYMAQANSSFEKAGLNFTAKADRTRVAFYSVYYNTRTDDMSSLCGPVIDDVRVWFSGSKRIGAGFGFWVFVLLVVGLV

SEQ ID NO: 67 - DNA, 1113 bp, Arabidopsis thaliana
atgatgtaccaagaagcagcactcctcttagctctcctcttcatctcttcgaatgtcgtcttatcggccccagtccgcgatggtttattaccaaacggcaacttcgagttgggtcctaaaccctcccaaatgaaaggatccgtggttaaggaacgaaccgccgtaccaaactggaacataatcggctttgtggagttcattaaatccggtcagaaacaagatgacatggtcttggtcgtaccgcagggttcctccgccgttagactaggcaacgaagcctcaatctcccagaaaatatccgtcctacctggccgtctgtactcaataacgttcagcgccgctcgaacctgcgctcaagacgagaggctcaatatatccgtgacgcatgagtcaggtgtgatccctatccagacgatgtacggcagcgatggttgggactcatactcatgggcttttaaagctggtggtcccgaaatcgagatccggttccataaccctggtgttgaagagcacccggcttgcggacctttgatcgacgccgtggctatcaaggctttgttccctcccagattctctggatataatctgataaagaatgggaatttcgaagaaggaccttacgtgtttcccacggcaaaatggggagtactgatcccaccgttcatcgaggacgataacagcccattgcccggttggatgatcgagtctctcaaagccgttaagtacgtagacaaagcacacttcgctgtccccgaaggacaccgagccatcgagcttgttggaggcaaagagagcgccatttctcagatagtgaggacgtcactgaacaaattctacgccctcacgttcaacgtgggagacgccagagacggttgtgagggaccaatgattgtggaagcgttcgctggacagggcaaggtcatggtggactacgcttctaaaggaaaaggcgggtttagacgtgggaggcttgtgttcaaggcagtgtcggccaggacacgtgtcactttcttgagcacgttttaccacatgaaaagcgatcactctggctcgctatgtggtccggtgatcgatgatgttaggctggtagcggttgggaaactccgaggatga

SEQ ID NO: 68 - protein, 370 aa, Arabidopsis thaliana
MMYQEAALLLALLFISSNVVLSAPVRDGLLPNGNFELGPKPSQMKGSVVKERTAVPNWNIIGFVEFIKSGQKQDDMVLVVPQGSSAVRLGNEASISQKISVLPGRLYSITFSAARTCAQDERLNISVTHESGVIPIQTMYGSDGWDSYSWAFKAGGPEIEIRFHNPGVEEHPACGPLIDAVAIKALFPPRFSGYNLIKNGNFEEGPYVFPTAKWGVLIPPFIEDDNSPLPGWMIESLKAVKYVDKAHFAVPEGHRAIELVGGKESAISQIVRTSLNKFYALTFNVGDARDGCEGPMIVEAFAGQGKVMVDYASKGKGGFRRGRLVFKAVSARTRVTFLSTFYHMKSDHSGSLCGPVIDDVRLVAVGKLRG

SEQ ID NO: 69 - DNA, 1098 bp, Arabidopsis thaliana
atggcggttcccaaagccattattctacctatcttgctactcatctgtggtgctgctctcggagctcctgcttctgaaggttatcttcgtaatggaaacttcgaagagtcaccaaagaaaaccgacatgaagaaaacagttctactaggcaaaaacgccttgcccgaatgggaaaccaccggtttcgtcgagtacatcgccggcggtcctcagccaggaggcatgtacttcccagtggctcatggagtccacgccgtgaggctcggaaacgaagctacaatctctcagaagttagaagtgaagccaggttctctctacgcactcacgtttggtgcgtcgagaacttgtgcacaagacgaagttcttagagtctctgtaccttctcagtccggtgacttgccacttcaaacactttacaacagtttcggaggtgacgtgtacgcttgggccttcgtcgccaagacttctcaagttactgtgactttccacaatcctggagttcaagaagatcctgcttgtggtcctttgttggacgctgtcgccattaaagagcttgttcatccaatctacaccagagggaacttggtgaagaatggagggttcgaagaaggtcctcaccgtctagtgaactccacacaaggagtcctactcccacctaaacaagaagatctcacatcacctttacctggttggatcatagagtcactcaaggcagtgaaattcatagactctaagtactttaatgtcccctttggacatgctgcgatcgagctagttgcaggcaaagaaagtgccattgcacaagtcattagaacctctcctggtcaaacttacaccctctccttcgtcgttggagatgctaagaatgactgccatggttccatgatggttgaagcttttgcagccagagatacactcaaagtaccacacacttccgttggtggaggtcatgtcaagaccgcgagtttcaagttcaaggcggttgaggcaagaactagaattactttcttcagtggtttttaccataccaagaagactgatactgtatctttatgtggtcctgtcattgacgagattgtggtttctcatgtcgcttag

SEQ ID NO: 70 - protein, 365 aa, Arabidopsis thaliana
MAVPKAIILPILLLICGAALGAPASEGYLRNGNFEESPKKTDMKKTVLLGKNALPEWETTGFVEYIAGGPQPGGMYFPVAHGVHAVRLGNEATISQKLEVKPGSLYALTFGASRTCAQDEVLRVSVPSQSGDLPLQTLYNSFGGDVYAWAFVAKTSQVTVTFHNPGVQEDPACGPLLDAVAIKELVHPIYTRGNLVKNGGFEEGPHRLVNSTQGVLLPPKQEDLTSPLPGWIIESLKAVKFIDSKYFNVPFGHAAIELVAGKESAIAQVIRTSPGQTYTLSFVVGDAKNDCHGSMMVEAFAARDTLKVPHTSVGGGHVKTASFKFKAVEARTRITFFSGFYHTKKTDTVSLCGPVIDEIVVSHVA

SEQ ID NO: 71 - DNA, 1110 bp, Brassica napus
atgtatcaagaagccgcacttctcttagcgctactctgcgtttcttctaatgtcgcggtgtctgctccaatccgcgacggtttattaccaaacggtaatttcgagataggtccaaaaccgtcccaactgaaaggatccgttgttaaggaacgaaacgccgttgctcactgggacatgaccggcttcgtggagtacatcaaagctggtcagaaacaagacgacatggttttggtcgtaccggaaggctcatcagccgtcaggttaggcaacgaggcctcaatctcccagaaaatatccgtacgatcaggtcgtctatattcgattacgttcagcgccgctcgaacttgcgctcaggacgagcggcttaacatctccgtcacgcatgagtctggtgtcatccctatccagacaatgtacggcagctatggctgggactcgtactcatgggcttttaaagctggtggacctgaaatcgtgatccggatccataacccgggtcatgaagagcacccggcttgtggaccgctgatcgacgctgttgctatcaaggctttgttccctccaagattctccggatataatctcataaagaacgggaacttcgaggaaggaccttacgtgttttccacggcaaagtggggagtactgataccacctttcatcgaggacgacaacagccctttgcctggatggataatcgagtctctcaaggccgttaagtacgtggacaaggcacacttcttcgtccctgagggacacagagccatcgagcttgttggaggcaaagagagtgccgtttctcagatcgtgaggacgtcacctaacaaattctacgccctcactttcaacgttggagacgccagagacgcttgcgaaggacccatggcagtggaggcgttcgctggacgtggcaagaccctggtggagtacgtgtctaaggggaaaggcgggtttaaacggggaaggcttgtgttcaaggcggtgtcggcgaggactcgagtcactttcctcagcacgttttaccatatgaagaatgatcactctggctcgctttgtggtccggtcgtcgacgacgtaaggctggtggcggttaagacactccgaggttaa

SEQ ID NO: 72 - protein, 369 aa, Brassica napus
MYQEAALLLALLCVSSNVAVSAPIRDGLLPNGNFEIGPKPSQLKGSVVKERNAVAHWDMTGFVEYIKAGQKQDDMVLVVPEGSSAVRLGNEASISQKISVRSGRLYSITFSAARTCAQDERLNISVTHESGVIPIQTMYGSYGWDSYSWAFKAGGPEIVIRIHNPGHEEHPACGPLIDAVAIKALFPPRFSGYNLIKNGNFEEGPYVFSTAKWGVLIPPFIEDDNSPLPGWIIESLKAVKYVDKAHFFVPEGHRAIELVGGKESAVSQIVRTSPNKFYALTFNVGDARDACEGPMAVEAFAGRGKTLVEYVSKGKGGFKRGRLVFKAVSARTRVTFLSTFYHMKNDHSGSLCGPVVDDVRLVAVKTLRG

SEQ ID NO: 73 - DNA, 1113 bp, Brassica napus
atgtaccaagaagtcgtacttctcttaactctactatgcgtttcttccagtgttgtcatatcgggcccgatcagtgatggtttattaccaaacggtaatttcgagaagggtccgaagccatcccaactgaaaggatccgttattaagggacgaaccgccgtgcctaactgggaaataaccggtttcgtggagtacattaaagctggtcagaaacaagacgacatggtcctggtcgtaccggaaggctcctccgccgtaagattaggcaacgaggcctccatctcccaaaaaatctcagtccgctcaggccgtctgtactcgattacgttcagcgccgctcgaacatgcgctcaggacgagcggctcaacatctccgtcactcatgagtccggtgtcattcctatccagaccatgtacggcagcgatggttgggactcctactcatgggcttttaaagctggtggatccgaaatagagatcaggatccataatccgggtcgtgaggagcacccggcttgtggaccattgatcgacgccatcggtatcaaggctttgttccctcccaggttctccggaaataatttgataaagaacggaaatttcgaagaaggaccttacgtgttcgccaaggcaaaatggggagtactgataccacctttcatcgaggacgataacagcccgttgcctggttggaagatcgagtctcttaaggccgttaagtacgtggacaaggctcatttcttcgtccctgagggacaccgagccatagagctagttggaggcaaagagagtgccgtttctcagatagtgaggacgtcgtcactcaacaaattctacgccctcggtttcaacgtaggagacgcaagagacgcttgcgagggaccaatggcagtggaggcgttcgctggagggaggaagatcctggtggagtacgcgtctaagggtaaaggcgggtttaaacaagggaggcttgtgttcaaggctgtgtctgcgaggactcgtgtcacttttctcagcacgttttaccatatgaagaatgatcactctggctcgctatgtggtccggttatagatgacgtcaggctagtggcggttaggacacttggaggatga

SEQ ID NO: 74 - protein, 370 aa, Brassica napus
MYQEVVLLLTLLCVSSSVVISGPISDGLLPNGNFEKGPKPSQLKGSVIKGRTAVPNWEITGFVEYIKAGQKQDDMVLVVPEGSSAVRLGNEASISQKISVRSGRLYSITFSAARTCAQDERLNISVTHESGVIPIQTMYGSDGWDSYSWAFKAGGSEIEIRIHNPGREEHPACGPLIDAIGIKALFPPRFSGNNLIKNGNFEEGPYVFAKAKWGVLIPPFIEDDNSPLPGWKIESLKAVKYVDKAHFFVPEGHRAIELVGGKESAVSQIVRTSSLNKFYALGFNVGDARDACEGPMAVEAFAGGRKILVEYASKGKGGFKQGRLVFKAVSARTRVTFLSTFYHMKNDHSGSLCGPVIDDVRLVAVRTLGG

SEQ ID NO: 75 - DNA, 1098 bp, Brassica napus
atggcggtgtctaaagccattgttatacctctcttactagtcttatgtgctgctgctcttggagctcctgcttatgaaggctttcttcgcaatggtaacttcgaggagtcaccaaagaagaccgacatgaaaaaaacagttctactcggcaaaaccgccttgcccgagtgggtaaccaccggtttcgtcgagtacatcgccggcggtcctcagccgggaggaatgtacttccccgtagctcacggcgtccacgccgtgaggctcggtaacgaagccaagatctctcagaagctaaaagtcaagccgggctctctctacgcgctcacgttcggcgcgtcgagaacttgcgcgcaagacgaggtccttcgcgtctctgtgcctcctcagtccggtgacttgccgcttcagacgctgtacaacagcttcggtggtgacgtgtacgcttgggctttcgtggccaagacttctgtggttacggtgactttccataaccctggagttcaagaagatccagcttgtggtcctttgttggacgctgtcgccattaaagagcttgttcatccaatgtacaccaaaggtaacttagtgaagaacggtggattcgaagaaggtcctcaccgtctagtgaactcaacacaaggagtccttctcccacctaaacaagaagatctcacatcacccttacctggatggatcattgagtcactcaaggcagttaagttcatagactccaagtacttcaatgtcccctttggacaagccgccatcgagcttgttgctgggagagaaagtgctattgcacaagtcattagaacttcaccaggtcaaacctacagtctctcctttgccgttggagatgctaaaaacgactgccatggatccatgatggttgaggcttttgcagccagagatacactgaaagtgccgcacacttcggttggtggaggtcactttaagatggcaagtttcaagttcaaggcgattggggcaaggactaggattactttcttcagtggctattaccatagcaagaaaatggatatgggatctctctgtggacctgtcattgatcagattgtggtttctcgtgtcgcttag

SEQ ID NO: 76 - protein, 365 aa, Brassica napus
MAVSKAIVIPLLLVLCAAALGAPAYEGFLRNGNFEESPKKTDMKKTVLLGKTALPEWVTTGFVEYIAGGPQPGGMYFPVAHGVHAVRLGNEAKISQKLKVKPGSLYALTFGASRTCAQDEVLRVSVPPQSGDLPLQTLYNSFGGDVYAWAFVAKTSVVTVTFHNPGVQEDPACGPLLDAVAIKELVHPMYTKGNLVKNGGFEEGPHRLVNSTQGVLLPPKQEDLTSPLPGWIIESLKAVKFIDSKYFNVPFGQAAIELVAGRESAIAQVIRTSPGQTYSLSFAVGDAKNDCHGSMMVEAFAARDTLKVPHTSVGGGHFKMASFKFKAIGARTRITFFSGYYHSKKMDMGSLCGPVIDQIVVSRVA

SEQ ID NO: 77 - DNA, 1176 bp, Capsicum annuum
atggaaatacattggagctcaacaagatgcaaatgggtcacaacctttcttcttctacttgcttgctctgctgctggacaagttgaagatggtccgttagttaacggcaattttgagacacctccgtcaggcggtttctcctccggcgacggattctccgatgggcccaccgaaatcccgagctggaaatcaaacggcaccgtagaggtagtagaatcagggcaaaaacagggtggaatgatcctcatagtaccacaaggtagacacgcagttcgactcgggaacgacgccgaaataagccaagagctcaaagtagaaaaaggctctatttactcaattacattcagcgcggctcgcacgtgcgctcagctagagtcactgaacgtttcggttcctcctgcgtcacagaccattgatcttcagacactgtatcatgtttcgggctgggattcctacgcgtgggcctttcaggctgaggaagatgacgtgcgggtcgtttttacaaatcctggtatggaggatgaccccacttgtgggcccatcattgacgatattgctatcaagaagctttttgtaccagataagtcaaaagataatgcagtagttaatggagactttgaagaaggtccatggatgttcaggaatgcttccctcggcgttttgcttccaaccaacctcgacgaggaaacatcgtcactccctggttggatagttgaatcaaatcgagcagtacgttacatcgatacatatcacttcacagttccagaagggaaaagagctatggaattgctttcaggaaaagaaggcattatatcccagatggttgaaaccaagcccaacaagccatacagattgacatttttgttgggccatgcaggggactcatgcaaggaaccactagcaatcatggcctttgctggtgatcaagcccaaaacattcattacactcctaattccaattcttcatttcagaatgctaacctgaacttcacggccaaggcggacaggacgcgtattgcgttctatagcatctattacaatacaagaagtgatgatatgagctctctttgtggacctgttgtggatgatgtgagggttcaactatcagggtctagcagagtcgaggttttagggtttgggtttatgttttggttgttagtcttagttttggtttaa

SEQ ID NO: 78 - protein, 391 aa, Capsicum annuum
MEIHWSSTRCKWVTTFLLLLACSAAGQVEDGPLVNGNFETPPSGGFSSGDGFSDGPTEIPSWKSNGTVEVVESGQKQGGMILIVPQGRHAVRLGNDAEISQELKVEKGSIYSITFSAARTCAQLESLNVSVPPASQTIDLQTLYHVSGWDSYAWAFQAEEDDVRVVFTNPGMEDDPTCGPIIDDIAIKKLFVPDKSKDNAVVNGDFEEGPWMFRNASLGVLLPTNLDEETSSLPGWIVESNRAVRYIDTYHFTVPEGKRAMELLSGKEGIISQMVETKPNKPYRLTFLLGHAGDSCKEPLAIMAFAGDQAQNIHYTPNSNSSFQNANLNFTAKADRTRIAFYSIYYNTRSDDMSSLCGPVVDDVRVQLSGSSRVEVLGFGFMFWLLVLVLV

SEQ ID NO: 79 - DNA, 1107 bp, Citrus sinensis
atggtagctcattcattgtctattgtgcttgctctcggcttgctcttgctcttatctggtcctgcatttgctgccaagtactttgaagggtacctcccaaatggcgactttgaggaactaccaaaaccaactaacctcaaaaagacagttctagttgggaaacatgcacttcccaaatgggaaatcaatggctttgttgaattcatcgccggtgggccccaacccggtggcatgttctttccagtatctcatggagtccatgccattaggcttggcaatgaggcttcgatctctcaaactataactgtaaaaccaggagccctttacgcactaacatttggtgcatcaagaacttgtgctcaagatgaggtgttgagagtctctgtgcctcctcagtcgggggatctgcctctgcagacattgtatgatattaacggtgacacttatgcttggggatttagagccaaaactaacattgttacagtgacattccacaatcctggtgttcaagaggatcctgcttgtggtccacttatcgatgctgttgctattaaggagctctatccgccaatgccgacaagagataacttggtcaagaatcctggctttgaagagggtccacatcggctagtaaacactactaatggagtccttcttcctccaagacaagaagatctcacatccccactccccggctggatcattgaatcactcaaagctgtcaagttcatagatgcaaagcacttcaatgtgccatatggacatgcggcagttgagcttgttgctggtagagaaagtgccattgctcaaattctaagaactgttcccaacaaagagtacaatctcacattcacaattggagatgcaaagaatggctgccatggatcaatgagggttgaagcatttgccggcaaagatacagtggctgttccatttgaatcaaagggaaaaggtgggttcaagagtgccagtctcaagttcaaagccatcgctgcaaggacaagaatcacattcttcagcacttactaccacaccaagattaatgactttggatctctttgtggccctgtcctcgatgaagttagagtactttctattagattttaa

SEQ ID NO: 80 - protein, 368 aa, Citrus sinensis
MVAHSLSIVLALGLLLLLSGPAFAAKYFEGYLPNGDFEELPKPTNLKKTVLVGKHALPKWEINGFVEFIAGGPQPGGMFFPVSHGVHAIRLGNEASISQTITVKPGALYALTFGASRTCAQDEVLRVSVPPQSGDLPLQTLYDINGDTYAWGFRAKTNIVTVTFHNPGVQEDPACGPLIDAVAIKELYPPMPTRDNLVKNPGFEEGPHRLVNTTNGVLLPPRQEDLTSPLPGWIIESLKAVKFIDAKHFNVPYGHAAVELVAGRESAIAQILRTVPNKEYNLTFTIGDAKNGCHGSMRVEAFAGKDTVAVPFESKGKGGFKSASLKFKAIAARTRITFFSTYYHTKINDFGSLCGPVLDEVRVLSIRF

SEQ ID NO: 81 - DNA, 1107 bp, Fragaria vesca
atggctctgttactagtctcttttacacttgctctctccctcatttccaccagtcctgcctttgctgttgcacctaagccttttgaaggactcttggccaatggaaatttcgaagaaccaccaaaaccaagcagcctcaagaaaacagtactcataggcaaaaatgcactgcccaaatgggaaatcaatggatttgtggagtacatctccggcgggcctcaaccaggcggcatgtactttgctgtagctcatggtgtccatgcagttaggctcggcaatgaggcctcgatctctcagaccataaaggtcaaaccaggatctctatatgccctaacattcggggcatcaagaacttgtgcacaggaagaggttttgagggtatcagtgcctcctcaggcaggagaccttcctttgcagactctatacagcagtaatggaggcgatacttatgcttggggattcaaagccacttctaacacagttaaagtgactttccacaatcctggaattcaagaagaccctgcttgcggtccactcttggatgcaattgctatcaaggagctcttccctgtactgcccaccagagataatctggtcagaaatcctgggtttgaggaggcaccccataggttaatgaactcttcccatggtgtactccttcctccaaaacaactagatgcaacctccccacttcctggctggatcattgagtccctcaaagccgtaaagttcattgatgccaagcactttaatgtcccatttggaaagggtgcggttgagcttgttgctgggagagagagtgccatcgcccaggttcttagaacagttcccaacaagctctacagtctctcattcactatcggtgacgcaaggaacggctgccatggatcaatgatggtcgaagcatttgcaggcaaggataccttgaaagttcctttcaactctcaaggaaaaggcggtttcaagaatgctagtttcaagttcaaagcaacttcattcaggaccagaattacattcttcagttctttctaccacaccaggactgatgactatggtgctctttgtggacccatcctagatgaagttaaggtttctcctattgcctag

SEQ ID NO: 82 - protein, 368 aa, Fragaria vesca
MALLLVSFTLALSLISTSPAFAVAPKPFEGLLANGNFEEPPKPSSLKKTVLIGKNALPKWEINGFVEYISGGPQPGGMYFAVAHGVHAVRLGNEASISQTIKVKPGSLYALTFGASRTCAQEEVLRVSVPPQAGDLPLQTLYSSNGGDTYAWGFKATSNTVKVTFHNPGIQEDPACGPLLDAIAIKELFPVLPTRDNLVRNPGFEEAPHRLMNSSHGVLLPPKQLDATSPLPGWIIESLKAVKFIDAKHFNVPFGKGAVELVAGRESAIAQVLRTVPNKLYSLSFTIGDARNGCHGSMMVEAFAGKDTLKVPFNSQGKGGFKNASFKFKATSFRTRITFFSSFYHTRTDDYGALCGPILDEVKVSPIA

SEQ ID NO: 83 - DNA, 1182 bp, Gossypium hirsutum
atggccgagagctccgcaataaacagatgcctcttcctttttatgcttatcttccctcatttctctactctagctctagctgaagatggattggtggcaaatggtgatttcgaggcacgaccctcgaacggcttcccaagcgaggcaatagcggatgggccgacggagatcccgagctggagaacaaaaggcagagtggagctggtgtcgtctggggaaaaagtgagcggagggatgctcctcatcgtgcccggaggctcgaaagccgttagattgggtaatgacgcagagatcagccaagaagtaacggtggagaaagggtccacgtacgcagttaccttcagtgcggcccgcacgtgcgcgcaacttgagtcattgaatgtgtccgtgccacctgcttcacagtcggtagacctccaaacattgtacaacgtgcaagggtgggacccttactcgatttcattcgaggcagaggtggataaagtgccgttgattttccggaacaccggaatggaagatgacccggaatgtgggcccatcattgatgatattgccattaaaaaacttgttacccctgatcagcccaaagacaatgcagtagttaacagtggctttgaatttggcccttggatgttccaaaatgtatctcttggtgtcttgcttccgaccaaccttgacgaagagacatccccattaccaggatggatggtcgaatcaaccagggcggttcgatacattgattccaaccattatgctgtcccagaaggcaaacgtgccgtggagttggtttccggcaaggaaggcatcatttctcaaatggtggaaaccaaaccagataagctatatagcttgaccttctctttggggcacgctggggacaaatgcaaggaaccactggctgtaatggcgtttgcaggggaccaggcacaaaattttcactacacgcctgactctaactccaccttccaagttgctagtgtgaacttcacagccaaggcggagaggacacgtatcgcgttctacagtgtgtattacaatacaagaaccgatgacatgagctcactatgtggtccggtggtggacgatgttcgggtgtggtattcatgggcaagtagaaatgaggtccaagtgttgttagggattggactttctttttgggcttaccttttcgttttggtttag

SEQ ID NO: 84 - protein, 393 aa, Gossypium hirsutum
MAESSAINRCLFLFMLIFPHFSTLALAEDGLVANGDFEARPSNGFPSEAIADGPTEIPSWRTKGRVELVSSGEKVSGGMLLIVPGGSKAVRLGNDAEISQEVTVEKGSTYAVTFSAARTCAQLESLNVSVPPASQSVDLQTLYNVQGWDPYSISFEAEVDKVPLIFRNTGMEDDPECGPIIDDIAIKKLVTPDQPKDNAVVNSGFEFGPWMFQNVSLGVLLPTNLDEETSPLPGWMVESTRAVRYIDSNHYAVPEGKRAVELVSGKEGIISQMVETKPDKLYSLTFSLGHAGDKCKEPLAVMAFAGDQAQNFHYTPDSNSTFQVASVNFTAKAERTRIAFYSVYYNTRTDDMSSLCGPVVDDVRVWYSWASRNEVQVLLGIGLSFWAYLFVLV

SEQ ID NO: 85 - DNA, 1143 bp, Gossypium hirsutum
atgacaatatctgcttcatttttgcttgcttctaccttgctgctcaccggctgtgttttgggtcctatatctcttgtttcagctaaacatggtgttccatcttatgctcataagaaaatcgcttctaaaccttttgaagggtatcttgaaaatggcaactttgaagaacagcccagcccgactgccttaaagaaaacagtactcaaaggagcacacgcacttcccaaatggactatcacagggctagtcgagtacatctcgggtgggcctcaacctggtgggatgttttaccccgtcgctcatggcgtccatgcggtgaagctcggaaacgaggccaccatttctcaaaccatacctgtaaaaccaggggtactgtatgcgctgacttttggggcgtccaggacttgtgcgcaagacgaggtgttgagagtgtcggtgggtactcagtcaggggaccttcccttgcagaccttgtacagtagtatcggtgatgacgtttatgcttggggtttcattcccaaaaccaagtatgccactgttaaattccataacccaggtgttcaagaggatcccacctgtggtccattgttggatgcggttgctattaaggagcttgtccgtcccagagctaccaaatataatctggtgaagaacaatggctttgaagagggtcctcatcgcctaatcaactccaccaatggtgtcttgctcccccctcggcaagaggatttcacatccccactccccggctggatcattgaatcactaaaagccgtaaaattcatcaatgcaaagcacttcaacgtcccggcgggaccactccgcaatcgaactggtttgccgggaaaaaaagtggccatcgcccaaaatcctcaggaacatcccccaacaaatcataacaacatgacgttcatccatcggggacccttcccaacgggttgcaacggagaaatgatggtggaggctttcgctgccaaacatacagtcaaagttcccttcacatcacgtggaaaaggtgaattcaaggctgcaagcttaatgttcaaagctgatacagccaggacaagagtgacattctacagctcttactaccacacgaggagtgatgacttcggggtctctttgtggtcctgttctggatga

SEQ ID NO: 86 - protein, 380 aa, Gossypium hirsutum
MTISASFLLASTLLLTGCVLGPISLVSAKHGVPSYAHKKIASKPFEGYLENGNFEEQPSPTALKKTVLKGAHALPKWTITGLVEYISGGPQPGGMFYPVAHGVHAVKLGNEATISQTIPVKPGVLYALTFGASRTCAQDEVLRVSVGTQSGDLPLQTLYSSIGDDVYAWGFIPKTKYATVKFHNPGVQEDPTCGPLLDAVAIKELVRPRATKYNLVKNNGFEEGPHRLINSTNGVLLPPRQEDFTSPLPGWIIESLKAVKFINAKHFNVPAGPLRNRTGLPGKKVAIAQNPQEHPPTNHNNMTFIHRGPFPTGCNGEMMVEAFAAKHTVKVPFTSRGKGEFKAASLMFKADTARTRVTFYSSYYHTRSDDFGVSLWSCSG

SEQ ID NO: 87 - DNA, 1173 bp, Glycine max
atggaaagaggcgcattgttagcaacgtgtggtctgctgttgcagcataaaacggagtggttggtgagaatgtcagagacattcatattcacactttctctggttatgctatgtgctgcttcagcttttgcagcagttccacacaggttgccagaagtttacctcaagaatggtaactttgaggagaatccaaaccccaaatacctcaagaaaacgacactgattgggaaatatgctcttccaaaatgggagatcagtggtcatgttgagtatgtctcaggggggccacaacctgggggtatgtacttcccagttagtcatggagtgcatgctgtgaggcttggaaatgaggcctcaatctcacaaaccattaaggtcaaacctggcaagtggtacgctctaattctaggagcctcaaggacttgtgctcaagatgaggttttaaggatctcagtgcctccacaatctggagaggttcctttgcagaccctttatagcctcaatggtgatgttatcgcttggggtttccgtcccacttcttctgttgccaaagtgatactccacaaccctggaattcaagaagaccctgcctgtggtccactcttggatgccgttgctatcgcagaattctgccctccaaagcctacaagagctaatttggttaaaaatccggggtttgaggtgggtccattccctattttcaactctacaaacggtgttctacttcctcccgaacaagaagatcatgtgtctccactccctggttggatgattgaatccctcaaagccgtgaagttcatagatgcaaaacatttcaatgtaccatttggacagggagcagtagaacttattgcaggcagggaaagtgtcattgcccaaattctcagaacagttcccaacaaaatttacaacatgaagttcacaattggagacgccagaaatggttgtcatggatcaatgatgattgaagcgtttgcagcaaaagataccctcaaagttcccttcaaatctgagggaaagggcgaattcaagactgtgagtttcaagttcagagcgattgaaaacagaacaagaatcacattctatagctccttctaccatacaagaattcatgactacggatctctttgtggccctgttattgatcaagttatagtgtatcctgtcgcctga

SEQ ID NO: 88 - protein, 390 aa, Glycine max
MERGALLATCGLLLQHKTEWLVRMSETFIFTLSLVMLCAASAFAAVPHRLPEVYLKNGNFEENPNPKYLKKTTLIGKYALPKWEISGHVEYVSGGPQPGGMYFPVSHGVHAVRLGNEASISQTIKVKPGKWYALILGASRTCAQDEVLRISVPPQSGEVPLQTLYSLNGDVIAWGFRPTSSVAKVILHNPGIQEDPACGPLLDAVAIAEFCPPKPTRANLVKNPGFEVGPFPIFNSTNGVLLPPEQEDHVSPLPGWMIESLKAVKFIDAKHFNVPFGQGAVELIAGRESVIAQILRTVPNKIYNMKFTIGDARNGCHGSMMIEAFAAKDTLKVPFKSEGKGEFKTVSFKFRAIENRTRITFYSSFYHTRIHDYGSLCGPVIDQVIVYPVA

SEQ ID NO: 89 - DNA, 1104 bp, Glycine max
atggcggtgactctaacatcaaccctctttatggctttgctatttgctgcttcagcttttgctgctcttcagcctagagtacctgaagcttaccttcaaaatggaaactttgaggagcagccaaaccccaaaaacctccagaaaacaaagctcatggggaaatattctttgcccaaatgggaagtcaatggtctggttgagtatgtctctgggggtccccaacctggaggcatgttcttcccagtgactcatggaatccatgctgtgaggcttggcaatgaggcctcaatctcccaaaatatcaaggtcaaacccggtcaactgtatgctctaattcttggggcctcaaggacttgtgcacaggatgaagttttgaggatctctgtgcctgcacagactggtgatgttcctttgcagaccctttatagcctcaatggtgatgttattgcttgggggtttaaggccacttctagtgttgtcaaagtgactttccacaaccccggagttcaagaagatccatcttgtggccctcttttggatgccattgctatcagagagttctaccctccaatgcctacaagagttaacttggtaaaaaatcctggctttgaggagggtccattccccattttcaactcaaccaatggtgttttgctcccgcctcaacaacaagatggcttctccccactccctggttggattattgagtcactcaaggctgtgaagttcattgattcaaagcatttcaatgtcccatttgggctgggagcagtggagcttgtggcaggcagggaaagtgccattgcccaaatcatcagaacagttaccaacaaagtctacaacatcacattttcagttggagatgccaaaaatgggtgtcatggatcaatgatggttgaagcatttgccgctaaagataccttcaaagttcccttcaaatctgaagggaagggaacatccaagactgtaagcttcaagttcaaagcaattgcaccaagaaccagactcactttctacagttccttctaccataccagaattgatgactatggttctctttgtggccctgttattgatcaagttatagtgttccctgttgcctaa

SEQ ID NO: 90 - protein, 367 aa, Glycine max
MAVTLTSTLFMALLFAASAFAALQPRVPEAYLQNGNFEEQPNPKNLQKTKLMGKYSLPKWEVNGLVEYVSGGPQPGGMFFPVTHGIHAVRLGNEASISQNIKVKPGQLYALILGASRTCAQDEVLRISVPAQTGDVPLQTLYSLNGDVIAWGFKATSSVVKVTFHNPGVQEDPSCGPLLDAIAIREFYPPMPTRVNLVKNPGFEEGPFPIFNSTNGVLLPPQQQDGFSPLPGWIIESLKAVKFIDSKHFNVPFGLGAVELVAGRESAIAQIIRTVTNKVYNITFSVGDAKNGCHGSMMVEAFAAKDTFKVPFKSEGKGTSKTVSFKFKAIAPRTRLTFYSSFYHTRIDDYGSLCGPVIDQVIVFPVA

SEQ ID NO: 91 - DNA, 1182 bp, Glycine max
atggctcggagctccacaagaatgaaatgggtctccatcttcacacttctattcctctcccactcgcccctcacaaccttcgcagaagatgggctagtggcgaatggagattttgaggttagcccatcaagtgggttccctaacgaggcgattgtggagggccccagcgaggtcccaaactggaagtcaaacggcaacgttgagctagtggaatcggggcaaaaacagggtgggatgatcctcattgtaccgcagggtagacacgcggtgaggctcggcaacgacgctgagatcagccaggagctaccggttgagaagggttccatttactcgctcaccttttgtgcggctcgcacctgcgctcagctggagtccatcaacgtgtcggttgcgcctgcatcgcagacggtagacctgcagacactctataacgtccagggatggaacccttacgcggtttctttcaatgcggatgaggacacttttaggttggtatttaagaatcccggcatggaggatgaccccacttgtggccccattattgacaacattgctattaagaagcttttcactcctgataaacccaaagacaacgcagtgatcaatggggattttgaagagggtccatggatgttcaggaacacttcactgggtgtgttgcttcccacaaatttggatgaagaagcgtcctcactacccggttggatagtcgaatccaaccgtgccgtccgttacattgattctgatcactactctgttccacaaggcaggagagccattgagttgctctcaagaaaggaaggaatcatatctcaaatggttgagaccaaaccagacatgctctacagcttgaccttctcattgggtcatgctgatgataagtgcaaggagcctcttgctgttatggcctttgctggggaccaggctcagaacattcactacactcccaattccaattctaccttccaaactgctaacgtcaatttcactgccaaggctgagaggactagaattgcattctatagcatatactacaacaccagaagtgatgatatgagttctctatgtgggcctgtggtggatgacatcagggtctggttttctggctccaacaggcttcatgggttgggcttaaaaaagcttatgcttataattttaggtctagttttaattctaatgtaa

SEQ ID NO: 92 - protein, 393 aa, Glycine max
MARSSTRMKWVSIFTLLFLSHSPLTTFAEDGLVANGDFEVSPSSGFPNEAIVEGPSEVPNWKSNGNVELVESGQKQGGMILIVPQGRHAVRLGNDAEISQELPVEKGSIYSLTFCAARTCAQLESINVSVAPASQTVDLQTLYNVQGWNPYAVSFNADEDTFRLVFKNPGMEDDPTCGPIIDNIAIKKLFTPDKPKDNAVINGDFEEGPWMFRNTSLGVLLPTNLDEEASSLPGWIVESNRAVRYIDSDHYSVPQGRRAIELLSRKEGIISQMVETKPDMLYSLTFSLGHADDKCKEPLAVMAFAGDQAQNIHYTPNSNSTFQTANVNFTAKAERTRIAFYSIYYNTRSDDMSSLCGPVVDDIRVWFSGSNRLHGLGLKKLMLIILGLVLILM

SEQ ID NO: 93 - DNA, 1182 bp, Glycine max
atggctcggagctccacaagaatgaaatgggtctccatcttcacacttctattcctctcccactcgcccctcacaaccttcgcagaagatgggctagtggcgaatggagattttgaggttagcccatcaagtgggttccctaacgaggcgattgtggagggccccagcgaggtcccaaactggaagtcaaacggcaacgttgagctagtggaatcggggcaaaaacagggtgggatgatcctcattgtaccgcagggtagacacgcggtgaggctcggcaacgacgctgagatcagccaggagctaccggttgagaagggttccatttactcgctcaccttttgtgcggctcgcacctgcgctcagctggagtccatcaacgtgtcggttgcgcctgcatcgcagacggtagacctgcagacactctataacgtccagggatggaacccttacgcggtttctttcaatgcggataaggacacttttaggttggtatttaagaatcccggcatggaggatgaccccacttgtggccccattattgacaacattgctattaagaagcttttcactcctgataaacccaaagacaacgcagtgatcaatggggattttgaagagggtccatggatgttcaggaacacttcactgggtgtgttgcttcccacaaatttggatgaagaaacgtcatcactaccaggttggatagtcgaatccaaccgtgccgtccgttacattgattccgatcactactctgttccacaaggcaggagagccattgagttgctctcaggaaaggaaggaatcatatctcaaatggttgagaccaaaccagacatgctctacagcttgaccttctcattgggtcatgctgatgataagtgcaaggagcctcttgctgttatggcctttgctggggaccaggctcagaacattcactacactcccaattccaattctaccttccaaactgctaacgtcaatttcactgccaaggctgagaggactagaattgccttctacagcatatactacaacaccagaagtgatgatatgagttctctatgtggacctgtggtggatgatgtcagggtctggttttccggctccaacgggcttcatgggttgggcttaggaaggcttgggcttgtaattttgggtttagttttggttctgatgtaa

SEQ ID NO: 94 - protein, 393 aa, Glycine max
MARSSTRMKWVSIFTLLFLSHSPLTTFAEDGLVANGDFEVSPSSGFPNEAIVEGPSEVPNWKSNGNVELVESGQKQGGMILIVPQGRHAVRLGNDAEISQELPVEKGSIYSLTFCAARTCAQLESINVSVAPASQTVDLQTLYNVQGWNPYAVSFNADKDTFRLVFKNPGMEDDPTCGPIIDNIAIKKLFTPDKPKDNAVINGDFEEGPWMFRNTSLGVLLPTNLDEETSSLPGWIVESNRAVRYIDSDHYSVPQGRRAIELLSGKEGIISQMVETKPDMLYSLTFSLGHADDKCKEPLAVMAFAGDQAQNIHYTPNSNSTFQTANVNFTAKAERTRIAFYSIYYNTRSDDMSSLCGPVVDDVRVWFSGSNGLHGLGLGRLGLVILGLVLVLM

SEQ ID NO: 95 - DNA, 1188 bp, Gossypium raimondii
atggatgctgctgagagctggtcgagaaccaaatgggtcttccattttatgcttatattcgctcatttctctcttctatcactagctgaagatggtctggtggccaatggtgatttcgagacgccaccgtccggcggcttcccaagcgaggcaatatccgatggagcccccgagatccccagctggagcacgaacggtacggtgaagcttgtgtccgccggtgaaaaagtgagcggcgggatgctactcatcgtaccccgaggcaggcacgccgtcagattgggcaacgacgcggagatcagtcaggaagtgacggttgagaaaggatcggcttacgcggttacgttcagtgcggcacgcacttgcgcgcagatggagtcactgaacgtgtccgtaccacctgcatcgcaaacggtggacctgcaaacattgtacaacgtgcaagggtgggacccttacacgatttcttttgaggcggaggaggataaaggccggttgatttttaggaatccgggcatggaagatgacccggaatgtggacccatcatcgatgacatagccatcaagaaacttatcacccctgataaacccaaagacaatgcagtagttaacagtggcttcgagttcggtccatggatgttccaaaacgtatctcttggtgtcctccttccaaccaacctcgacgaagagacatcgccattacctggatggatggtcgaatcgaaccgagcggttcgatacattgattccaatcactatgcagtcccagaaggtaaacgtgccgtggagttagtctcgggcaaggaaggcatcatttcacaaatggtcgaaaccacaccaaacaagctatacagcttgaccttttcattgggccacgctagggacaaatgcaaggaaccactagctgtcatggcctttgctggagaccaagcacaaaattttcactacactccggactccaactctaccttccaagtcgctagtgtcaacttcacggccaaagcggagagaacacgaatcgcattctacagcgtgtattacaatacccgaaccgacgacatgagctcattatgcggtccggtggtggatgatgttcgtgtttggttttcggggtcctgtagaactaaggttcaaacattgttagggattggacttgccttttcggcttaccttttggttttggtttag

SEQ ID NO: 96 - protein, 395 aa, Gossypium raimondii
MDAAESWSRTKWVFHFMLIFAHFSLLSLAEDGLVANGDFETPPSGGFPSEAISDGAPEIPSWSTNGTVKLVSAGEKVSGGMLLIVPRGRHAVRLGNDAEISQEVTVEKGSAYAVTFSAARTCAQMESLNVSVPPASQTVDLQTLYNVQGWDPYTISFEAEEDKGRLIFRNPGMEDDPECGPIIDDIAIKKLITPDKPKDNAVVNSGFEFGPWMFQNVSLGVLLPTNLDEETSPLPGWMVESNRAVRYIDSNHYAVPEGKRAVELVSGKEGIISQMVETTPNKLYSLTFSLGHARDKCKEPLAVMAFAGDQAQNFHYTPDSNSTFQVASVNFTAKAERTRIAFYSVYYNTRTDDMSSLCGPVVDDVRVWFSGSCRTKVQTLLGIGLAFSAYLLVLV

SEQ ID NO: 97 - DNA, 1185 bp, Hordeum vulgare
atggagcgagggctcgcattgctggggctggggctggcgctgcttctgctggcgccctctcgccgcctggcctcggccgctccggtggaggacggcctgctcatcaatggtgatttcgagacagcaccgcctggtggtttcgtcaaatcttcttctgtttcggagggcgcagcgatcccaagctggacgatcaatggaacagttgagctcatttccgcaggccagcaccagggtggcatgatccttattgttccacaaggggatcatgccgtacggctagggaatgatgcaggcattgggcaggtggtgcaggttgagaagggctccgagtacgcgatcacattcagtgccgcccggacctgcgcgcagctggagtcactgaatatctccgctgggagcatatcgcagacagtcgacttgcagacactgtacagcatagaaggctgggatgcatatgcactggctttccaagcagtggatgagcaggccaacattgaatttaggaaccctggcatggaggacgacccaacctgcgggcctatccttgacaacgtggccatcaagaagctcttctcccccgacaaagcaaaggagaacatggtggtcaatggagactttgaggaggggccatggatgtttccaaacacaagcttcggcgtcctgctcccgacaaaccttgacgagcagacatcggccttaccagggtggatgatcgaatcgaaccgcgcagtccgcttcatcgactccgaccagtacactgttccccaggggaagcgcgccattgagcttctctccggcaaggagggcatcatctcgcagatggttgagacgacccctcagaaggcgtacatcctgacgttcacgctgggctcggcaggggattcgtgccagccaccaatggccgtcatggcattcgcaggcgaccaggcccagaacttccactactcccctatgggcaatgccacgagtcaggccgtgaacgtcaacttcacagcgcgcgccgagaggtcacgcgttgcgctctacagcgtctactacaacacgagaagcgacgaccacagctcgctgtgtgggccggtgatcgacgacgtccgtgtctggggcttgaatggggctgctgggttgaaggcgagcatcgggattcttattgccatggttagtgtcatcgttctcgtgctgttctga

SEQ ID NO: 98 - protein, 394 aa, Hordeum vulgare
MERGLALLGLGLALLLLAPSRRLASAAPVEDGLLINGDFETAPPGGFVKSSSVSEGAAIPSWTINGTVELISAGQHQGGMILIVPQGDHAVRLGNDAGIGQVVQVEKGSEYAITFSAARTCAQLESLNISAGSISQTVDLQTLYSIEGWDAYALAFQAVDEQANIEFRNPGMEDDPTCGPILDNVAIKKLFSPDKAKENMVVNGDFEEGPWMFPNTSFGVLLPTNLDEQTSALPGWMIESNRAVRFIDSDQYTVPQGKRAIELLSGKEGIISQMVETTPQKAYILTFTLGSAGDSCQPPMAVMAFAGDQAQNFHYSPMGNATSQAVNVNFTARAERSRVALYSVYYNTRSDDHSSLCGPVIDDVRVWGLNGAAGLKASIGILIAMVSVIVLVLF

SEQ ID NO: 99 - DNA, 1095 bp, Ipomoea nil
atggctgccaagatttgttttgcgctctttttctgcttagttttagctgtttctgctctaaatgctcctcttgaaggttttctgccaaatgggaactttgaggagggtccgaaggcgagtgacataaagaaaacagttctccaagggaaacacgcgctgccgagatgggaaacctccggcctagtggagtacatctccggcgggccgcagccgggggggatgttctttccggtggcgcacggcgtccacgccgtgaggctgggaaacgaggcgtcgatatcgcagaacatcccggtgaagaagggggctctttacgcgctgacatttgcggcgtcgagaacgtgcgcgcaggaagaggttttgagggtgtcggttccccccttgtccggagacattcctctgcagacactttacagcagcaatggcggcgatgtggtttcctttgctttcagagccgcttctgaggctgcaatggtgacgttccataaccctgggaagcaagaagatcccacttgtggacctctcattgatgctgttgctattaaggaactcctgcctgtattgcccactagagagaatttggtgaggaacaacgggtttgaggagggtcctcaccggctaaggaacgcttcaaacggcgttctcctccctccaaagcagcaagacatggtatccccgcttccaggctggctaatcgagtcgctcaaggcggtcaagtacatagacgcagcccacttcaacatccccttcgggcgggcagcagtcgagctggtggcagggagggaaagtgcgattgcacagatcatcagaaccgtcccgaataaggtctacaccctagcgttcaccgtgggagacgccaagaacggctgccatggcgacatgatggtcgaggcgtttgcaggcaagagcgccttcaaagttcccttcagatccgtcgggaaaggccactccaaatctgtcagcttcaggttcactgccatttcaatcagaactaggttaactttcttcagctccttttaccatactaggatcaatgactatggaactctctgtggcccggttctcgacgaggttaaggtctcccccgctgtctag

SEQ ID NO: 100 - protein, 364 aa, Ipomoea nil
MAAKICFALFFCLVLAVSALNAPLEGFLPNGNFEEGPKASDIKKTVLQGKHALPRWETSGLVEYISGGPQPGGMFFPVAHGVHAVRLGNEASISQNIPVKKGALYALTFAASRTCAQEEVLRVSVPPLSGDIPLQTLYSSNGGDVVSFAFRAASEAAMVTFHNPGKQEDPTCGPLIDAVAIKELLPVLPTRENLVRNNGFEEGPHRLRNASNGVLLPPKQQDMVSPLPGWLIESLKAVKYIDAAHFNIPFGRAAVELVAGRESAIAQIIRTVPNKVYTLAFTVGDAKNGCHGDMMVEAFAGKSAFKVPFRSVGKGHSKSVSFRFTAISIRTRLTFFSSFYHTRINDYGTLCGPVLDEVKVSPAV

SEQ ID NO: 101 - DNA, 948 bp, Juglans hindsii x regia
atggctcagagctcctcaaaaagcaaatgggtctcgcttttgatgcttctctttgctcgttgggctactgcaatcgtaatagaagatggtcctttgccaaacggtgattttgaaacgccgccatcaaacgggttcccaaacggggcaatagcagaagggcccaccttggtccccagctggagatcgaacggcacggtagagctcgtcgaagcgggccaaaaacagggcgggatgatcctcattataccccagggcagacacgccgtgcggcttggcaatgacgccgagatcagccaggacctgaaggtggagaagggatccatatattccgtcacgttcagcgcggctcgtacctgcgcgcagctagagtcactgaacgtgtccgtgccgccggcgtcgctgacaatagacctgcagacactgtacaacgtgcaagggtgggacccttacgcctacgcgttcgaggctgaggaggatgatgtgagtttggtttttaggaatccgggcatggaggacgaccccacttgtggacccatcattgatgacattgccataaaaaagctcttcagtcccgatagactcaaagacaatgcagttatcaatggaaacttggaagaaggcccatggatgtttaggaacacttcgctcggtgtcttactccccaccaaccttgatgaagaaatatcctcattaccaggttggaatgtggaatccaacagggccatccgctacatagactccgaccacttcactgtcccggaaggcaaacgagccatcgaattgctttcaggcaaggaaggcataatttcccagatggtggaaacaacagcaaacaaaccatacaccttgaccttttccttggggcaagctggggacaaatgcaagcagccacttgccgtcatggccttttgccggagaccaggctcaaaacatccattacacgcctga

SEQ ID NO: 102 - protein, 315 aa, Juglans hindsii x regia
MAQSSSKSKWVSLLMLLFARWATAIVIEDGPLPNGDFETPPSNGFPNGAIAEGPTLVPSWRSNGTVELVEAGQKQGGMILIIPQGRHAVRLGNDAEISQDLKVEKGSIYSVTFSAARTCAQLESLNVSVPPASLTIDLQTLYNVQGWDPYAYAFEAEEDDVSLVFRNPGMEDDPTCGPIIDDIAIKKLFSPDRLKDNAVINGNLEEGPWMFRNTSLGVLLPTNLDEEISSLPGWNVESNRAIRYIDSDHFTVPEGKRAIELLSGKEGIISQMVETTANKPYTLTFSLGQAGDKCKQPLAVMAFCRRPGSKHPLHA

SEQ ID NO: 103 - DNA, 1188 bp, Lotus japonicus
atggctcggagctccacaagaatgaaatgggtggtatccatgttcgtgcctctaatccttctccatttggtccttgcagctccagaagaagatgggctagtaccaaatggagactttgaggcatccccatcaaacgggtttccaagtgaggcaacaataatagagggtcccagtgaagtaccaagctggaaatcaaacggcaccgttgagctagtagagtcagggcaaaagcaaggtggtatgatcctcatcgtaccacaaggtagacacgcaataaggctaggcaacgacgctgagatcagccaggaaataacggtggagaagggctcaatctactcaatcacgttttgtgcggctcgcacgtgcgctcagttggaatccatcaacgtgtccgtgccacctgcatcgcagaccatagacctgcagacactgtataacgtgcaagggtggaacccttatgctgtcgctttcaatgcagatgaggacaatgttaggttggtttttaagaaccctggtatggaggatgaccccacttgtggccccattcttgacaacattgctatcaagaagcttttcactcctgataaacccaaagacaatgcagtaatcaatggtgattttgaagaaggtccatggatgttcaagaatacttcaatgggtgttttgcttcccacaaacttggacgaggaaacttcctcgatgcccggttggatagtcgaatccaaccgagccatccgctacattgattccgatcattatgctgttccacaaggaaagagagcaattgagttgctctcaggaaaagaaggcatcatctcccaaatggttgaaacttcaccagacaagctatacagcttgaccttttcattaggccatgctgatgacaagtgcaaggagcctcttgctgtcatggcctttgctggtgaccaagctcaaaacattcactatactccaaactccaattctaccttccaaactgctaacctcaatttcactgccaaggctgacagaactagaattgctttctacagtgtgtactacaacaccagaagtgatgatatgagctctttgtgtgggcctgtggtagatgatgtgagggtctggttttctatgtccaacaggcttggtgggttgggctttgtaaggcttgggcttggggttttgggtttagtttggcttcttctttaa

SEQ ID NO: 104 - protein, 395 aa, Lotus japonicus
MARSSTRMKWVVSMFVPLILLHLVLAAPEEDGLVPNGDFEASPSNGFPSEATIIEGPSEVPSWKSNGTVELVESGQKQGGMILIVPQGRHAIRLGNDAEISQEITVEKGSIYSITFCAARTCAQLESINVSVPPASQTIDLQTLYNVQGWNPYAVAFNADEDNVRLVFKNPGMEDDPTCGPILDNIAIKKLFTPDKPKDNAVINGDFEEGPWMFKNTSMGVLLPTNLDEETSSMPGWIVESNRAIRYIDSDHYAVPQGKRAIELLSGKEGIISQMVETSPDKLYSLTFSLGHADDKCKEPLAVMAFAGDQAQNIHYTPNSNSTFQTANLNFTAKADRTRIAFYSVYYNTRSDDMSSLCGPVVDDVRVWFSMSNRLGGLGFVRLGLGVLGLVWLLL

SEQ ID NO: 105 - DNA, 1110 bp, Lactuca serriola
atgtcgaaacttatctccatgttgcttgttttaatcttcgtctccacctctgttcttgctgctcgtccccctgcaactccaatggaaggtctcttgccaaatggaaacttcgaagaaccaccaaaagcaaccgacataaagaaaacagtcctgctgggtaaaaccgcattacccaaatgggaaatcagcggtctagttgagtacatccacggcggacctcagccgggtggaatgtactttccggtggcacacggcgtccacgccgtcagactcgggaacgaagctacaatctctcaaaatatagctgtgaaagctggatctttatatgctgtgacgtttggtgcttccaggacatgtgcgcaagaggaggttttgagagtatcggtgccaccgcagtccggtgaccttccgctgcagactctttacagcagcgacggtggcgatgtctacgcttatggatttaaagcgaattcgagctcagtgaggttaaccttccataaccctggtgtacaagaagatcccaaatgtggtcctctcattgacgccgtcgccattaaagagctcctccctcccagacctactcgccttaatatcgtgaaaaatggcggatttgaggaaggacctcaccggttattcaactcctccaatggcgtcctcctccctcctcgacaagaagacataacatctcctctccccggatggatcatcgagtctctaaaagccgttaagttcatcgacaacaaacacttctacgtcccctccggcgttgccgccatcgaactagtcgccggaagagaaagcgccatcgcacaaatcctccgaacaatcccaaacaaactctacagcctatcatttgccattggagacgcgaagaacgggtgccatggagacatgatggttgaagcatttgctgcaaaagacaccctgaaagctccattcaaatcggaaggaaaggggaagtcgaaggtggtgagcatgaagtttaaggcgctgtcggcgagaactagagtgactttttacagctcgtattatcacactagggctgatgattttgggtctctttgtggccctgtaattgatgaagttagggtttttcctgtgagagcttaa

SEQ ID NO: 106 - protein, 369 aa, Lactuca serriola
MSKLISMLLVLIFVSTSVLAARPPATPMEGLLPNGNFEEPPKATDIKKTVLLGKTALPKWEISGLVEYIHGGPQPGGMYFPVAHGVHAVRLGNEATISQNIAVKAGSLYAVTFGASRTCAQEEVLRVSVPPQSGDLPLQTLYSSDGGDVYAYGFKANSSSVRLTFHNPGVQEDPKCGPLIDAVAIKELLPPRPTRLNIVKNGGFEEGPHRLFNSSNGVLLPPRQEDITSPLPGWIIESLKAVKFIDNKHFYVPSGVAAIELVAGRESAIAQILRTIPNKLYSLSFAIGDAKNGCHGDMMVEAFAAKDTLKAPFKSEGKGKSKVVSMKFKALSARTRVTFYSSYYHTRADDFGSLCGPVIDEVRVFPVRA

SEQ ID NO: 107 - DNA, 1083 bp, Malus x domestica
atgggtcggagctccacattacacaaatgggtcttaccgacgctgcttcttctcggtcatttggctgctgaaatttcagcagatgacgggccggtgccaaacggagattttgaactgaccccatcaggcggcttttcaaacgacggtgctgtggacgggcccgccgggatccccagctggaaagcaaacggcaccgtcgagcttgtcgaatccgggcagaaacagggtgggatgatcctcatcgtaccgcaaggtagacacgcggtgaggctcggaaacgacgccgaaataagccagcaagtgaaggtggagaaagggtcgatatactcggtgactttcagcgcggcccgcacgtgcgcacagctggagtcgctgaacgtgtccgtgccacctgcgtcgcagacgatagaccttcagaccttgtacaacgtgcaggggtgggacccctacgcgtgggccttcgaggcggaggaggatgatgcgatgttggtcttcaggaatcccggcatggaggatgaccccacttgtgggcccatcattgatgacgttgctatgaagaaactctttacccctgataggcccaaagacaacgcagtgatcaatggtgattttgaggaaggtccatggatgtttccaaacatctcactcggagtcctgctcccaaccaacctcgacgaagaaacttcttccttacccggttggatcgtcgagtccaaccgggctgttaggtacatagactcgtaccattacgcagtgccacaaggcaaacgggccattgaattggtatctggaaaagaaggcatcatatctcaaatggttgaaacttcaccaaacaagccctacaccttgaccttctcattaggccatgctaatgacaaatgcaagcagcctctcggcatcatggcattcgccggagaccaggcgcaaaacgtccattacacaccgaattccaacagcacgttccaaaccgccggcgtgaatttcacggccaaggctgagaggacaaggattgcattctacagtgtgtattacaacaccaggactgatgacatgagctcactctgtgggccctgtggtggatga

SEQ ID NO: 108 - protein, 360 aa, Malus x domestica
MGRSSTLHKWVLPTLLLLGHLAAEISADDGPVPNGDFELTPSGGFSNDGAVDGPAGIPSWKANGTVELVESGQKQGGMILIVPQGRHAVRLGNDAEISQQVKVEKGSIYSVTFSAARTCAQLESLNVSVPPASQTIDLQTLYNVQGWDPYAWAFEAEEDDAMLVFRNPGMEDDPTCGPIIDDVAMKKLFTPDRPKDNAVINGDFEEGPWMFPNISLGVLLPTNLDEETSSLPGWIVESNRAVRYIDSYHYAVPQGKRAIELVSGKEGIISQMVETSPNKPYTLTFSLGHANDKCKQPLGIMAFAGDQAQNVHYTPNSNSTFQTAGVNFTAKAERTRIAFYSVYYNTRTDDMSSLCGPCGG

SEQ ID NO: 109 - DNA, 1104 bp, Medicago truncatula
atggcagtgacattcatatgtacacttttcatgactttgctctttgctgcttcagcatttgctaaggttcaccctaggtcgccagaagttttcttccgaaatgggaactttgagcagcaaccgaacccgggttacataaagcaaacaagactcatggggaaacatgcacttcccaattgggaaaccaatggtctagttgagtatatcactggtgggccacaacctggaggcatgttcttcccagtgtcacatggtgttcatgctgttaggcttggaaatgaagcatccatttcacaaaccatcaaagtcaaacctggtacatggtatgctataatcttaggagccacaagaacttgtgctcaagatgaagttttgagaatctcagtgcctctacaatctggtgatgttcctttgcaaacactttatagcctcaatggtgatgttattgcttggggattcaaggctagatcttcttttgctaaagttaccttccataaccctggtatgcaagaagaccctacttgtggtccacttttggatgctgttgctattagagagttctaccctccgatgccgacaagagctaatttagtaagaaaccctggctttgaggagggtccattcccaattttcaactcaaccaatggtgtcatacttcctccaaaacaacaagatcttgtgtctccactccctggttggattattgaatccctcaaagccattaaattcattgattcaaaccatttccaagtgccatttggaaaaggagcagtggagcttgttgcaggtagggaaagtgccattgcacaaattctaagaacagttacaaacaaagtctacaacttgaaattcacagttggagatggaagaaatggttgtcatggatcaatgatggttgaagcttttgctgcaagagagactcttaaagttccttttaaatctgttggaaagggaatattcaaaacagcaaatttcaacttcaaagcagtttcaaatagaacaagaatcacattctacagctctttctatcatacaaaaattgatgattatggaagtatgtgtggccctgtccttgatcaagttatagtatccccagttgcttaa

SEQ ID NO: 110 - protein, 367 aa, Medicago truncatula
MAVTFICTLFMTLLFAASAFAKVHPRSPEVFFRNGNFEQQPNPGYIKQTRLMGKHALPNWETNGLVEYITGGPQPGGMFFPVSHGVHAVRLGNEASISQTIKVKPGTWYAIILGATRTCAQDEVLRISVPLQSGDVPLQTLYSLNGDVIAWGFKARSSFAKVTFHNPGMQEDPTCGPLLDAVAIREFYPPMPTRANLVRNPGFEEGPFPIFNSTNGVILPPKQQDLVSPLPGWIIESLKAIKFIDSNHFQVPFGKGAVELVAGRESAIAQILRTVTNKVYNLKFTVGDGRNGCHGSMMVEAFAARETLKVPFKSVGKGIFKTANFNFKAVSNRTRITFYSSFYHTKIDDYGSMCGPVLDQVIVSPVA

SEQ ID NO: 111 - DNA, 1104 bp, Nicotiana benthamiana
atggtggtgaaggtttcaatcttccttcttttcttatttctcttcactgtctctgccgttcgcccagctcctcctcttgaaggactactttcaaatgggaatttcgaagagcaaccaaagccaaaagacctcaagaaaaaaacagtacttgtaggcaaatatgctttgcccaaatgggaaatcaacggtttggtagagtacatctctggcgggccacagcctggcgggatgtacttcccagtcgcccacggcgtccatgccgtgaggctagggaatgatgcctcaatttctcaaacaattccagtaaagaaaggctctttgtatgcactcacatttggggcatcaagaacctgtgctcaagatgaggtcttgagggtgtcggtacctcctcaaaccggggaccttccattgcagaccctttatagcagcaatggcggtgatacctatgcttggggtttctatgctacttctaatgtagttaaagttacctttcataatcctggagttcaagaggatccagcttgtggtccactcttggatgctgttgctatcaaagaactcttccctcctcagcccaccagagttaatttggttaaaaatcctggttttgaagaaggacctcacctcttgataaactcttcgcacggagttcttctccctcccaaacaagaagatttgacatccccacttccaggctggatcattgagtcactcaaagcagtgaaattcttggattcagctcatttcaatgtcccgtttggccgagctgcagttgaactacttgcagggagagaaagtgccattgcccaaatcattaggacagtccctaagaaggtgtatgcctttgcattcactgttggcgatgcaaagaacggttgccatggcgatatgatgattgaagcattcgctgctaaagaaacattcaaagttcccttcaagtcacaaggaaaaggcagctttaagactgttagtttcaagttcacagctattgcagacaggacaagaattactttctacagctcttattaccatacaaagatcaatgactatggatctctttgtggtcctgttgtggatgaagttaaggtgacccctgttgcttag

SEQ ID NO: 112 - protein, 367 aa, Nicotiana benthamiana
MVVKVSIFLLFLFLFTVSAVRPAPPLEGLLSNGNFEEQPKPKDLKKKTVLVGKYALPKWEINGLVEYISGGPQPGGMYFPVAHGVHAVRLGNDASISQTIPVKKGSLYALTFGASRTCAQDEVLRVSVPPQTGDLPLQTLYSSNGGDTYAWGFYATSNVVKVTFHNPGVQEDPACGPLLDAVAIKELFPPQPTRVNLVKNPGFEEGPHLLINSSHGVLLPPKQEDLTSPLPGWIIESLKAVKFLDSAHFNVPFGRAAVELLAGRESAIAQIIRTVPKKVYAFAFTVGDAKNGCHGDMMIEAFAAKETFKVPFKSQGKGSFKTVSFKFTAIADRTRITFYSSYYHTKINDYGSLCGPVVDEVKVTPVA

SEQ ID NO: 113 - DNA, 1101 bp, Nicotiana tabacum
atggtggtgaaggtttcaatcttgcttcttctctccttgctctccactgtctctgccgttcgcccagctcctcttgaaggactacttccaaatgggaatttcgaagagcaaccaaagccaaaagacctcaagaaaaaaacagtactcgtaggcaaatatgctttgcccaaatgggaaatcaatggcttggtagagtacatttctggcgggccacagcccggcgggatgtacttcccagtcgcccacggcatccatgccgtgaggctagggaatgatgcctcaatttctcaaacaattccagtaaagaaaggctctttgtatgcactcacatttggggcatcaagaacctgtgctcaagatgaggtattgagggtgtcggtacctcctcaaaccggggaccttccattgcagaccctttatagcagcaatggcggtgatacctatgcttggggtttctatgctacttctaatgtagttaaagtttcctttcataatcctggagttcaagaggatccagcttgtggtccactcttggatgctgttgctataaaagaactcttccctcctcggcccaccagagtgaatttggtaaaaaatcctggttttgaagaaggacctcacctcttaataaactcttcgcacggagtccttctccctcccaaacaggaagatttgacatccccacttccaggctggatcattgagtcactcaaagcagtgaaattcttggattcagctcatttcaatgtcccgtttggccaagctgcagttgaactacttgcagggagagaaagtgccattgcccaaatcattaggacagtccctaagaaggtgtatgcctttgcattcactgttggtgatgcaaagaacggttgccatggcgatatgatggttgaagcattcgctgctaaagaaacattcaaagttcccttcaagtcacaaggaaaaggcagctttaagactgttagtttcaagttcacagctatcgcagacaggacaagaattactttctacagctcttattaccatacaaagatcaatgactatggatctctttgtggtcctgttgtggatgaagttaaggtgacccctgttgcttag

SEQ ID NO: 114 - protein, 366 aa, Nicotiana tabacum
MVVKVSILLLLSLLSTVSAVRPAPLEGLLPNGNFEEQPKPKDLKKKTVLVGKYALPKWEINGLVEYISGGPQPGGMYFPVAHGIHAVRLGNDASISQTIPVKKGSLYALTFGASRTCAQDEVLRVSVPPQTGDLPLQTLYSSNGGDTYAWGFYATSNVVKVSFHNPGVQEDPACGPLLDAVAIKELFPPRPTRVNLVKNPGFEEGPHLLINSSHGVLLPPKQEDLTSPLPGWIIESLKAVKFLDSAHFNVPFGQAAVELLAGRESAIAQIIRTVPKKVYAFAFTVGDAKNGCHGDMMVEAFAAKETFKVPFKSQGKGSFKTVSFKFTAIADRTRITFYSSYYHTKINDYGSLCGPVVDEVKVTPVA

SEQ ID NO: 115 - DNA, 1200 bp, Oryza sativa
atggagggagattcggcgaggaggctcgcattgctggggctgtgcctgggcctgcttctgctggcgccctcccatctggcctcggccgctgcggtggaggatggcttgctcagcaatggtgactttgagacagcaccagctggtggttttgtcaaatctgcttcagttgctgaaggtgcatcatcgatccctggctggacgatcaatgggacagtcgagctcatctcagcaggccagcaccagggtggcatgattcttattgttccacagggggatcatgctgtacgtcttggaaacgacgcaagtatagggcaggtggtgcaggttgagaagggctcagagtatgctatcacgttcagtgctgcccgaacgtgtgcacagctagagtcactcaatgtgtctgtgctcggtggtgcatcacagacagtggacctgcagacattgtacaacatagaaggctgggatgcatatgcattggcttttcaggcaacagatgagcaggcgagccttgagttcaggaaccctggtatggaggatgatccgacttgtggacctatccttgacaacgttgccataaagaagctcttcactccagacaaaccaaaggatactgtggtgtcaaatggagactttgaggagggtccatggatgtttccaaacacgagctttggggtgcttctcccaaccaacctcgatgagcagacgtctgccttgcctggctggatgattgagtcaaaccgagctgtccgctttgtcgactctgaccaatacaccgttccccaagggaagcgcgccattgagcttctatcagggaaggaaggcatcatctcacagatggtcgagacaacccctcagaaagagtacagcctgacattcacattgggctcagcaggggattcatgccagccaccaatggctgtcatggcattcgcaggtgaccaggcccagaacttccactactcgcccatgggtaatgccacaagccaggctgcgaatgtgacattcacagcacgagctgagaggacgcgggtagcgttctacagtgtgtattacaacacgagaagcgacgaccacagctcgctctgtgggccagtgatcgatgatgtgcgcgtctggggcttgaatggagctgctgggttgaaggcaagtattgggctgctgcttggcattgttagcattgtcagtctgatgttgttctga

SEQ ID NO: 116 - protein, 399 aa, Oryza sativa
MEGDSARRLALLGLCLGLLLLAPSHLASAAAVEDGLLSNGDFETAPAGGFVKSASVAEGASSIPGWTINGTVELISAGQHQGGMILIVPQGDHAVRLGNDASIGQVVQVEKGSEYAITFSAARTCAQLESLNVSVLGGASQTVDLQTLYNIEGWDAYALAFQATDEQASLEFRNPGMEDDPTCGPILDNVAIKKLFTPDKPKDTVVSNGDFEEGPWMFPNTSFGVLLPTNLDEQTSALPGWMIESNRAVRFVDSDQYTVPQGKRAIELLSGKEGIISQMVETTPQKEYSLTFTLGSAGDSCQPPMAVMAFAGDQAQNFHYSPMGNATSQAANVTFTARAERTRVAFYSVYYNTRSDDHSSLCGPVIDDVRVWGLNGAAGLKASIGLLLGIVSIVSLMLF

SEQ ID NO: 117 - DNA, 1182 bp, Oryza sativa
atggagcttcctcggggtgccctgctgctggtgctgctcgccgtcgccgccgccgcctcctccgccggtgccacactcgccgtcaaagctccagttccagttccagttccagctcctgcccctgcccatgcacctcctcaacctaaagatgctgaaggcctcctcatcaatggcaacttcgagacggcgccgaggaaggtgaacaagacactcatcgtcggccgccactcgctgccggggtggacgctgcgggggcacgtcgagtacgtctccggcgggccgcagcccggcggcatgttcttcgcggtgccgcacggcgtgcacgctctccgcctgggcggccgcgcgtcggcgtcccagaacgtgtccgtgcgccccggcgcgctctacgcgctcaccttcgccgccacgcgcacgtgcgcccaggacgaggcgctccgcgtcgccgtcgcgccgtcgctctcgccgcccgccgacgtcgccgtccgcacgctctacagcgccgacaccgccgacacctgggcgtggggcttccgcgcctcctccgccgccgcgcaggtcaccttctccaaccccggcgtccaggaggacgcgtcgtgcggccccctgctcgacgccgtcgccatcaaggagctcccaacgccatacccaaccaaagacaacctgatcaagaacgagggattcgagatcgggccgcaggtgttcaagaactcgacggtgggcgtcctccttccgccgaagcagaaggacgcgacgtcgccgctcccgggctggatcatcgagtcgctcaaggccgtccgcttcatcgacgcggcgcacttctccgtcccggcggggcagtacgccgtggagctcgtcgccggcagggagagcgccatcgcgcaggtgatccgcacggtggcgaaccgcgcctacaacctatcgttcgtcgtcggcgacgccaagaacggctgccacgggtcgatgctggtggaggcgttcgccgggaacgtgacgcagaaggtgccgttcgagtccgtcggaaacggcgggttcaagccggcgagcttccggttcgtcgccgccggcgtgcgcaccagggtgaccttctacagctcgtactaccacaccaaggtgagcgacggcgtctcgctgtgcggccccgtgctggatcaggtcaaggtccagccattgaaggcgtga

SEQ ID NO: 118 - protein, 393 aa, Oryza sativa
MELPRGALLLVLLAVAAAASSAGATLAVKAPVPVPVPAPAPAHAPPQPKDAEGLLINGNFETAPRKVNKTLIVGRHSLPGWTLRGHVEYVSGGPQPGGMFFAVPHGVHALRLGGRASASQNVSVRPGALYALTFAATRTCAQDEALRVAVAPSLSPPADVAVRTLYSADTADTWAWGFRASSAAAQVTFSNPGVQEDASCGPLLDAVAIKELPTPYPTKDNLIKNEGFEIGPQVFKNSTVGVLLPPKQKDATSPLPGWIIESLKAVRFIDAAHFSVPAGQYAVELVAGRESAIAQVIRTVANRAYNLSFVVGDAKNGCHGSMLVEAFAGNVTQKVPFESVGNGGFKPASFRFVAAGVRTRVTFYSSYYHTKVSDGVSLCGPVLDQVKVQPLKA

SEQ ID NO: 119 - DNA, 1227 bp, Picea sitchensis
atggcgaaaaaatcggagcttccattctcgtcggttttccgtcttctgcaagtattaatatgcttaagcattctctcgaccttcgttacggcacaagatggcgttacggcagaagacggtctgctggtgaatggaaactttgaaaaggaggggatcgagaatagaacatcacgggcaggcgatatagattctttgcccgggtggaatattgatggcatggtggaatacataaatgaggggcagaagcagggcagcatgtacctggtcgttcctgaaggaaaacatgccgtgaggctgggcaacgaggctcagatcagccaacagataaatattcagaaaggatccacatattctctcacattcagcgcggctcgaacctgcgcgcagctggaatcgcttaacgtctctgtgcctccgtcgactaggaacgtagatttgcagactttgtacagtatttatggctgggatacctatgcctgggcttttcaggcccaatctgaaaatgtggaagttattttccaaaatcctggaatggaagaagatcctacttgcggtccgattcttgacgccattgccttgaaacagatttctactcctgataagctccgagacaatgctgtgattaatggagatttcgaagaggggccgtggatgtttgcaaatgagacactgggagttcttttgccgacgaatttggacgtggcaacatcttctttgccgggatggattatggagtcgagcaaggcggtgagatatatcgactcgaatcactacaaagttcccgaggggaagagagccatcgagcttctttccggcaaagaaggtattatttcgcagatggtggagacagatcccggcaataaatatacgatgagttttctcttgggacaggccggcgatggctgccaggaacctatggcggtcatggcttttgccggagatcaagcggatagtttccacttcaacaatcctccggcaaacggcatctatgagcctaataatgtgaccttcacagctaaggctgcacggacccgcattgcattttacagcttgtactataatacaagggttcgggataggagttctctgtgtggccctgtgattgatctagtaaaagtggttgatctgtcgaagtctggcacagttgcaggcttttcaggattctctgtttccctgctacttttggtgagcgtgttaacgatggcgttcacactgggtagtctgtaa

SEQ ID NO: 120 - protein, 408 aa, Picea sitchensis
MAKKSELPFSSVFRLLQVLICLSILSTFVTAQDGVTAEDGLLVNGNFEKEGIENRTSRAGDIDSLPGWNIDGMVEYINEGQKQGSMYLVVPEGKHAVRLGNEAQISQQINIQKGSTYSLTFSAARTCAQLESLNVSVPPSTRNVDLQTLYSIYGWDTYAWAFQAQSENVEVIFQNPGMEEDPTCGPILDAIALKQISTPDKLRDNAVINGDFEEGPWMFANETLGVLLPTNLDVATSSLPGWIMESSKAVRYIDSNHYKVPEGKRAIELLSGKEGIISQMVETDPGNKYTMSFLLGQAGDGCQEPMAVMAFAGDQADSFHFNNPPANGIYEPNNVTFTAKAARTRIAFYSLYYNTRVRDRSSLCGPVIDLVKVVDLSKSGTVAGFSGFSVSLLLLVSVLTMAFTLGSL

SEQ ID NO: 121 - DNA, 1107 bp, Picea sitchensis
atgtggagctccggggtttcgatctgccgttttctatgtctgctgcagtttctttttcagctatgggtctctgtcacggccagtgatggtctgcttccaaatggggactttgagttggctcccaagcccaaggacctgaaaggcacggtccttctagggcgaaactccttaccacaatggcgaaccaaaggttttgtggagtacataacctctggacatcatcagcgtgatatgttagtggtcgtccccgaaggagcccacgctgtgagactgggaaacgaggcgtccatcagccagagtatcaaggtcaccaggggttcgtattactcgcttacatttagtgcagcgaggacttgtgcacagtctgagagattgaacgtctctgtgcctccgttttctggagacatatccatacagaccctttacagcagcaatggctgggatgcttactcttgggcattcagggctccttccagtgtagtcgatgtaattcttcacaaccccggcgttgaagaagatccggcttgcggaccggtgctggacgcagtagccatcaaggagttgtttccccctaggttcacaaaattcaatctgataaagaatggagattttgaggaagggccttacatgttcgcaagctccaactcaggcgtgcttctccctcccaatgttgaagatgccatctctcctctgccgggatggatcatcgaatccctgaaagctgtcaagtaccttgacggagcgcattttgcagttccgcagggcaggagggccgtggagctcgtggccggcaaagaaagtgccatatcccagatcgtccgaacggttcctggcagattctaccgcttgagcttcgctgtaggagatgccaggaatacctgtttgggtaacatgattgtggaggcttttgctgggagggaaacggtaaaggttcccttcgaatcgaagggagccggtaccttcaaggctgcaacgctcgcgtttactgcgattgctcccaggactcgcgttacattcttcagcacgttttacaccatgagaagtgacgacttcagtacgctgtgcggtccagtgatagatcaagttaaactcttttctcttcgttaa

SEQ ID NO: 122 - protein, 368 aa, Picea sitchensis
MWSSGVSICRFLCLLQFLFQLWVSVTASDGLLPNGDFELAPKPKDLKGTVLLGRNSLPQWRTKGFVEYITSGHHQRDMLVVVPEGAHAVRLGNEASISQSIKVTRGSYYSLTFSAARTCAQSERLNVSVPPFSGDISIQTLYSSNGWDAYSWAFRAPSSVVDVILHNPGVEEDPACGPVLDAVAIKELFPPRFTKFNLIKNGDFEEGPYMFASSNSGVLLPPNVEDAISPLPGWIIESLKAVKYLDGAHFAVPQGRRAVELVAGKESAISQIVRTVPGRFYRLSFAVGDARNTCLGNMIVEAFAGRETVKVPFESKGAGTFKAATLAFTAIAPRTRVTFFSTFYTMRSDDFSTLCGPVIDQVKLFSLR

SEQ ID NO: 123 - DNA, 1107 bp, Pinus taeda
atgtggtgctccagggtttcgatctgccgtttcttatgtctgctgcagttgctttttcagctatggggatctgtcaccgccagtgatggtctgctgccgaatggggactttgagttggctcctaagcccaagaacctgaaaggcacggtccttgtagggcgaaactccttaccgaagtggcgaaccagaggttttgtggagtacataacatctggacatcgtcagcgtgatatgttggtggtcgtcccggaaggagcccacgctgtgagactgggaaacgaggcctccatcagccagagtatcaaggtcacaaggggctcctattactcgcttacatttagtgcggcgaggacttgtgcacagtttgagagattgaatgtctctgttcctccgttttctggagacatatccatacaaaccctgtacagcagcaatggctgggatgcttattcctgggcattcagggctctttccagtgtagtcgatgttattcttcataaccccggcgttacagaagatccggcttgcggaccagtgctggatgcagtggcaatcaaggagttgttcccccctcgattcacaagattcgatctgataaagaatggcgattttgaggagggcccttacatgttcccaagctccaactccggcgtgcttctccctcccaacgttgaagatgccatttctcctctgccgggatggatcatcgaatctctgaaagctgtcaagtaccttgacggggcacattttgcagttccgcagggcaggagggccgtggagcttgtggccggcaaggaaagcgccatatcccagctcgtcagaacgattcccggcagattgtaccgcttgagctttgcagtgggagatgccaggaatacctgcatgggtaacatgattgtggaggcatttgctggaagggaaacagtcaaggttcccttcgaatcaaagggagccggaacctttaaggctgcaacactcgctttcactgcgatcgcccccaggactcgcgttactttcttcagtacgttttacaccatgagaagcgacgacttcagtacgctttgcggtcctgtgatagatcaagttaaactcttttccgttcgttaa

SEQ ID NO: 124 - protein, 368 aa, Pinus taeda
MWCSRVSICRFLCLLQLLFQLWGSVTASDGLLPNGDFELAPKPKNLKGTVLVGRNSLPKWRTRGFVEYITSGHRQRDMLVVVPEGAHAVRLGNEASISQSIKVTRGSYYSLTFSAARTCAQFERLNVSVPPFSGDISIQTLYSSNGWDAYSWAFRALSSVVDVILHNPGVTEDPACGPVLDAVAIKELFPPRFTRFDLIKNGDFEEGPYMFPSSNSGVLLPPNVEDAISPLPGWIIESLKAVKYLDGAHFAVPQGRRAVELVAGKESAISQLVRTIPGRLYRLSFAVGDARNTCMGNMIVEAFAGRETVKVPFESKGAGTFKAATLAFTAIAPRTRVTFFSTFYTMRSDDFSTLCGPVIDQVKLFSVR

SEQ ID NO: 125 - DNA, 1209 bp, Pinus taeda
atggctaaaacttctgagctctcattgctactgttttttcgttttcttgaaacattagtgtgcttaagtgttctttcgaccttcgttgcagcagaagatggtctgctggtgaatggaaactttgaaaaggcggggatcgagaatagaacatcacgggcaggcgtgatggattcgttgccggggtggactatagagggcacggtggaatatgtaaatgacggggagaggcagggcagcatgtacctggttgttcctgaaggtaagcatgccgtgaggctgggcaacgacgcccagatcagccaacagataagtcttcagaaaggatcgacatattctctcacatttagcgcggcgcgaacctgtgcgcagatggaatcgctcaacgtttctgtgcctccgtctactaggaacgtagatttgcagactctgtataatatttatggctgggatgcctatgcctgggcttttcaggcccaagctgacaatgtcgaggttattttccacaatccgggcttggaagaagatccaacttgcggtcccattcttgacgccatcgccttgaaacagatttctactcctgaaaagctccgagacaatgctgtgattaatggagatttcgaagaggggccgtggatgtttgcgaatgagaccttgggggttcttttgccgacaaacctggacgtggcaacatcatctctaccgggatggatcatagagtcgagcaaggcggtgcgatatatcgactcgaatcactacaaagttcccgagggtaagagagccatcgagcttctttcgggcaaagaaggtattatttcgcaaatggtggagacagaacccggcaagaaatatacgatgagttttctcatgggacaggccggcgatggctgccaggaacctatggcggtcatggcttttgccggagatcagtcgggtaatgtccactacaataatcctccgccaaacggcatctatgagcctaataatgtgacctttacggcaaaggccgaacggacccgcattgctttctacagcttgtattataatacgagggttgcagataggagttctctgtgtggccccgtgattgattcagtaaaggtcgttgatctgtccaagtctgctgctgttgcaggcttttctggattctctgtttccctgctacttctcgtgaacgcattgacgatagcattcacactgggcagtctgtaa

SEQ ID NO: 126 - protein, 402 aa, Pinus taeda
MAKTSELSLLLFFRFLETLVCLSVLSTFVAAEDGLLVNGNFEKAGIENRTSRAGVMDSLPGWTIEGTVEYVNDGERQGSMYLVVPEGKHAVRLGNDAQISQQISLQKGSTYSLTFSAARTCAQMESLNVSVPPSTRNVDLQTLYNIYGWDAYAWAFQAQADNVEVIFHNPGLEEDPTCGPILDAIALKQISTPEKLRDNAVINGDFEEGPWMFANETLGVLLPTNLDVATSSLPGWIIESSKAVRYIDSNHYKVPEGKRAIELLSGKEGIISQMVETEPGKKYTMSFLMGQAGDGCQEPMAVMAFAGDQSGNVHYNNPPPNGIYEPNNVTFTAKAERTRIAFYSLYYNTRVADRSSLCGPVIDSVKVVDLSKSAAVAGFSGFSVSLLLLVNALTIAFTLGSL

SEQ ID NO: 127 - DNA, 1098 bp, Populus trichocarpa
atggccgttgggatctcacttttgcttgcatcattcttgctcttcactacctctgctttagctgctacttacatggaaggctttctaaaaaatggcaactttgaagagaaaccaaaacctggcgcgatcaagaaaacagtccttaaaggaaaatatgcgcttcccagctgggaaatcaatggattcgtagagtacatctctgctgggccacaacctggtggcatgtactttaatgtggctcatggtgtccatgcagtaaggctaggcaatgaggcctcaatttctcaaacaataacaataaaagcaggctctctatatgccctcacatttggtgcatcaagaacatgtgcccaagatgaggtgttgagagtctcagttgggaccgtgtttggggacctgcccttgcagacactgtatagtagcaatggcggagacacttatgcttggggatttaaactcaatgccactgttgttaaagtgtcatttcgcaatactggagtccaagaggaccctgcctgtgggccactcattgatgcagttgctatcaaggagctctttccaccaatgcccacaagagataaccttgtaaagaatcatggctttgaggagggtcctcatcggttagtaaacacatccagtggtgtcctcctccctccaagacaagaagatctcacatctccacttcccggctggatgatcgaatcacttaaagctgtgaagttcattgacaaaaagcacttcaacgttccttttgggctcgctgctgtcgagcttgttgcaggaagagaaagtgcaattgcccaaatcctcagaacaattcccgacaaagtctacggtctcacattcaccgtcggggacgcaagaaatggttgccatggatcaatgatggtcgaggcattcgctgctaaggataccttcaaagttccattcgaatccaagggaaagggtgaattcaagaccgtaagtttcaagttcaaagccgttacagctcggacaagaattacgttttacagctcatactaccatactaggattgatgacttcggatccctctgtggtcctatactcgatgaagttagggtattccctattgcttag

SEQ ID NO: 128 - protein, 365 aa, Populus trichocarpa
MAVGISLLLASFLLFTTSALAATYMEGFLKNGNFEEKPKPGAIKKTVLKGKYALPSWEINGFVEYISAGPQPGGMYFNVAHGVHAVRLGNEASISQTITIKAGSLYALTFGASRTCAQDEVLRVSVGTVFGDLPLQTLYSSNGGDTYAWGFKLNATVVKVSFRNTGVQEDPACGPLIDAVAIKELFPPMPTRDNLVKNHGFEEGPHRLVNTSSGVLLPPRQEDLTSPLPGWMIESLKAVKFIDKKHFNVPFGLAAVELVAGRESAIAQILRTIPDKVYGLTFTVGDARNGCHGSMMVEAFAAKDTFKVPFESKGKGEFKTVSFKFKAVTARTRITFYSSYYHTRIDDFGSLCGPILDEVRVFPIA

SEQ ID NO: 129 - DNA, 1110 bp, Populus trichocarpa
atggctttgttcctctctatttgcgttgctctccttttctccttttgccatggcttagctaatgctgccattccacctccacctcttgatggacttgttgaaaatggggattttgaagaggcaccagcaaaatcaaacctcaagaaaacagtgatcataggaaaacactcactcccaaaatgggaaatcaatggcttagtagagtatgtctcaggtgggccacaaccagggggattcttcctagccattcctcggggggtccatgcagtgaggctgggcaatgaggcctctatctctcaaattcttactgtcaaaccaggctcagtctatgcactcacatttggagccaccagaacctgtgctcaagatgaagtgctaagggtctcagtccctggccagtcaagcgacctccctcttcagaccttgtatagcagtgatggtggtgacacttattccttggcttggaaagctacttctaaagctgtcaaggtcacatttcataaccctggtgttcaagaggacccctcttgtggacctctattggatgctattgcaatcaaggagctgccacctctcaagcgtactattggcaacctggttaaaaatggtggctttgaagttggtccacatgtgttcaagaacttctcaactggaatcttgatccctgccaagcaacaagatctaatctcaccactccccggctggatcgttgaatctctcaaacctgtaaaatacattgacaagaagcacttctttgttccctcaggatttgccgcgattgagatggtagctgggagagagagtgccatagcacaagtcattaggacaattcctaacaaattttataacctcacatttacaattggagatgcaaagaatgcttgccatggatctatgatggttgaggcttttgctgccaaggaaactgtcaaagcaccctatgtttctcagggaaagggtggatccaagactgcaagtttaaggttccaggcaatttcagacaggacaaggattacattttacagttcatactatcacaacaagatgcacgattatggtcatatgtgtggccctgtcttggatgatgttagggtgtttccaactcactga

SEQ ID NO: 130 - protein, 369 aa, Populus trichocarpa
MALFLSICVALLFSFCHGLANAAIPPPPLDGLVENGDFEEAPAKSNLKKTVIIGKHSLPKWEINGLVEYVSGGPQPGGFFLAIPRGVHAVRLGNEASISQILTVKPGSVYALTFGATRTCAQDEVLRVSVPGQSSDLPLQTLYSSDGGDTYSLAWKATSKAVKVTFHNPGVQEDPSCGPLLDAIAIKELPPLKRTIGNLVKNGGFEVGPHVFKNFSTGILIPAKQQDLISPLPGWIVESLKPVKYIDKKHFFVPSGFAAIEMVAGRESAIAQVIRTIPNKFYNLTFTIGDAKNACHGSMMVEAFAAKETVKAPYVSQGKGGSKTASLRFQAISDRTRITFYSSYYHNKMHDYGHMCGPVLDDVRVFPTH

SEQ ID NO: 131 - DNA, 1098 bp, Populus trichocarpa
atggctgttgggttttcgcttatgcttgcattgttcttgctcttcattggctctgcctcagctgctacttacatggaaggctttctcaaaaatggcaactttgaagagaaaccaaaacctggtgccatcagaaaaacagtccttaaaggaaaaaatgcactccccagctgggaaatcaatggcttcgtagaatacatctctgctgggccacaacccggtggcatgtactttaatgtggctcatggtgtccatgcggtaaggctaggcaatgaggcctcaatttctcaaacaataacgataaaagcaggctctctttatgccctaacttttggtgcttcaagaacttgtgctcaagacgaggtgttgagagtctcagttggtcctgtgtttggggacctgcctttgcagactctgtatagtagtaatggtggagacacttatgcttggggatttagactcaatgccactgttgttcaagtgacatttcacaataccggggtccaagaggaccctgcgtgtggaccactcattgatgcagttgctatcaaggagctctttccaccaatgcccacgagagataaccttgtaaggaatcatggctttgaggagggtcctcatcggttagtaaacacctccaatggcatcctccttcctccaagacaagaagatctcacatctccactccctggctggattattgaatcacttaaagctgtgaagttcattgacaaaaggcacttcaatgttccctttggacttgctgctgttgagcttgttgcaggaagagaaagtgcaattgcccaaatcctcagaacaactcccaacaaagtctacagtctcgcattcacaatcggagacgcgaggaatggttgccatggatccatgatggttgaggcattcgctgctggtgatacatttaaggttccattcgaatccaaaggaaagggtgaatccaagagcgcaagtttcaagttcaaagccatttcagctaggacaagaattacattttacagttcatactaccatactaggattgatgactacggatccctttgtggtcctatacttgatgaagttagggtatcccctattgcttag

SEQ ID NO: 132 - protein, 365 aa, Populus trichocarpa
MAVGFSLMLALFLLFIGSASAATYMEGFLKNGNFEEKPKPGAIRKTVLKGKNALPSWEINGFVEYISAGPQPGGMYFNVAHGVHAVRLGNEASISQTITIKAGSLYALTFGASRTCAQDEVLRVSVGPVFGDLPLQTLYSSNGGDTYAWGFRLNATVVQVTFHNTGVQEDPACGPLIDAVAIKELFPPMPTRDNLVRNHGFEEGPHRLVNTSNGILLPPRQEDLTSPLPGWIIESLKAVKFIDKRHFNVPFGLAAVELVAGRESAIAQILRTTPNKVYSLAFTIGDARNGCHGSMMVEAFAAGDTFKVPFESKGKGESKSASFKFKAISARTRITFYSSYYHTRIDDYGSLCGPILDEVRVSPIA

SEQ ID NO: 133 - DNA, 1182 bp, Poncirus trifoliata
atggtgaaaagctcttcaacaactagatgggtttctctgtttatgtttgttgttgctcatttggcttcttcaatcctagccgaagatggtttagtggctaatggcgattttgagacatccccgtcgcacggcttcccgagtgagtccagagcagatgggcccacagagattccaagctggaaattaaacggcaccgtagagctggtctcatcagggcaaaaacaaggtgggatgatcctcattgtgccgcagggttctcacgccgttagattaggcaacgatgcagggatcagccaggaagtgaaagttgaaaaagggtctacgtattccgttacgttcagtgcggcgcgcacgtgcgcgcagctggagtcgctgaacgtgtccgtgccacctgcatcacagaccatagacctgcagacattgtataacgtgcaagggtgggacccgtacgcgtgggcttttgaggcagaagacgacaatgtgaagcttctttttaagaacccgggcatggaagatgaccccacttgtgggccaatcattgatgatattgcgatcaagaagcttttcgctcctgataagcccaaagacaatgctgtagtcaatggcgatttcgaagaaggtccgtggatgtttggaaatgtatcgctaggagtcttgcttcccaccaacctcgatgaagagacatcctcattgcctggttggattgttgaatcaaacagagctgtccgttacatcgactcctaccattactcagtcccccaaggaaaacgtgccattgaattagtctcagggaaggaaggcattatctctcaaatggttgaaaccacggcaaacaaggattacagcttgacattttctttaggccacgctggggacaaatgcaagcaaccacttgcagtcatggcatttgctggggatcaagcccaaatagtacattacacagaggatgctaactcgaccttccatgatgctaatgtgaatttcactgccaaagctgatagaacacggattgcattttacagcgtgtattacaatacaagaacagatgacatgagctcattatgtggtccggttgtggatgacgtgagggtgtggttttcaggttctagtaaaattgtatttggacgattgggattaggccttggggttggcttttggttgcttgttttagttctgttttag

SEQ ID NO: 134 - protein, 393 aa, Poncirus trifoliata
MVKSSSTTRWVSLFMFVVAHLASSILAEDGLVANGDFETSPSHGFPSESRADGPTEIPSWKLNGTVELVSSGQKQGGMILIVPQGSHAVRLGNDAGISQEVKVEKGSTYSVTFSAARTCAQLESLNVSVPPASQTIDLQTLYNVQGWDPYAWAFEAEDDNVKLLFKNPGMEDDPTCGPIIDDIAIKKLFAPDKPKDNAVVNGDFEEGPWMFGNVSLGVLLPTNLDEETSSLPGWIVESNRAVRYIDSYHYSVPQGKRAIELVSGKEGIISQMVETTANKDYSLTFSLGHAGDKCKQPLAVMAFAGDQAQIVHYTEDANSTFHDANVNFTAKADRTRIAFYSVYYNTRTDDMSSLCGPVVDDVRVWFSGSSKIVFGRLGLGLGVGFWLLVLVLF

SEQ ID NO: 135 - DNA, 1206 bp, Panicum virgatum
atggagcggggttcgccgagggggaggcgcgcattgctggcgctgtgctcggcgctgcttctcctggcggcgcccgcccggccggtatgggcggctccggtggaggatggcctgctcagcaatggtgactttgagaccgcaccagccggtggttttgtcaaatctgcatctgttgctgagggtgcatcatcaatccctggttggacgatcaatggcacagttgagctgatttcagcaggccagcaccagggtggcatgatccttattgttccacagggggatcatgctgtacggctaggaaatgatgctagtgttgggcaggtggtggaggttgagaagggctcagagtatgctatcacattcagcgctgcccgtacatgtgctcagctggaggcactgaatgtgtccgtgctaggtggtgtatcacagacagtggatttgcagacattgtacaacatagaaggctgggatgcgtatgccctcgcttttcaggcaacagatgagcaggcacatattcagttcatgaaccctggcatggaggatgatccaacctgcgggcctatccttgacaatgtcgccatcaagaagctcttcactccagacaagccaaaggataatgtggttctcaatggagactttgaggaaggtccgtggatgttcccaaacacaagctttggagtgctgctcccgaccaacctcgatgagcaaacatccgccatacctggctggatgatcgagtcaaaccgggctgtccgcttcattgactctgatgaatacaaggttccacaggggaagcgcgccatcgagcttctgtcaggcaaggagggcatcatctcccagatggtggagacaaccccccagaaggagtacagccttacgttcacgctggggacggcgggggactcatgccagccaccgatggccatcatggcgttcgctggcgaccaggcccagaacttccactactcgccgatgggcaacgccaccagccaggccgcaaatgtgacgttcacagcgcgcgccgagaggacacgcgtggcattctacagcgtgtactacaacacgaggagcgacgaccacagctctctgtgcgggccggtgatcgacgacgtccgcgtatggggcttgaacgcggctgccgggttgaaggcaagtgtcgggctggttctcagcattgttggtatggtcggcatggtgctcctctga

SEQ ID NO: 136 - protein, 401 aa, Panicum virgatum
MERGSPRGRRALLALCSALLLLAAPARPVWAAPVEDGLLSNGDFETAPAGGFVKSASVAEGASSIPGWTINGTVELISAGQHQGGMILIVPQGDHAVRLGNDASVGQVVEVEKGSEYAITFSAARTCAQLEALNVSVLGGVSQTVDLQTLYNIEGWDAYALAFQATDEQAHIQFMNPGMEDDPTCGPILDNVAIKKLFTPDKPKDNVVLNGDFEEGPWMFPNTSFGVLLPTNLDEQTSAIPGWMIESNRAVRFIDSDEYKVPQGKRAIELLSGKEGIISQMVETTPQKEYSLTFTLGTAGDSCQPPMAIMAFAGDQAQNFHYSPMGNATSQAANVTFTARAERTRVAFYSVYYNTRSDDHSSLCGPVIDDVRVWGLNAAAGLKASVGLVLSIVGMVGMVLL

SEQ ID NO: 137 - DNA, 1104 bp, Phaseolus vulgaris
atggcacctactctctcttcactgctccttttggctttgctatgtgctgcttcggcttttgctgcccttgagcccagagtaccagaagcttaccttcaaaatgggaactttgaggagcagccgaaccccaaatacctgaagaaaacaaagctggttgggaaatttgctttgcccaaatgggagatcagtggtctgattgagtatgtctctgggggaccccaacctggtggcatgttcttccctgttactcatggaattcatgctgtgagacttggcaatgaggcctcgatctcccaaactatcaaggtcaaacagggtcaactctatgctctgattcttggggcctcaaggacttgtgcacaagatgaagtattgcgaatctctgtgcctccacagactggtgatgttccgttgcagaccctttataacctcaatggtgatgttattgcttgggggtttaaggccacttctaatgttgtcaaagtgactttccacaaccctggagttcaagaagatccagcttgtgggccacttttggatgccattgctatcagggagttctaccctccaatgcctactagagttaacttggtgaaaaatcctggctttgaggagggtccattccccattttcaactctaccaacggtgttctgctccctcctcaacaacaagatgggttctccccacttcctggttggatcattgagtccctcaaggctgtgaagttcattgattcaaagcatttcaatgtcccatttgggctgggggcagtggagcttgtggcaggcagggaaagtgccattgcccaagtcatcagaacagataccaacaaagtctacaacatcacattttcagttggagatgccaaaaatgggtgcaatggatccatgatggttgaagcatttgctgctaaagataccttcaaagttcccttcaaatctgaaggaaagggcacattcaggactgtgagtttcaagttcaaagctattgcaaagagaacaagactcactttctacagctccttctatcataccagaagtgatgattatggttctctttgtggccctgttattgatcaagtcatagtgttccctgttgcctaa

SEQ ID NO: 138 - protein, 367 aa, Phaseolus vulgaris
MAPTLSSLLLLALLCAASAFAALEPRVPEAYLQNGNFEEQPNPKYLKKTKLVGKFALPKWEISGLIEYVSGGPQPGGMFFPVTHGIHAVRLGNEASISQTIKVKQGQLYALILGASRTCAQDEVLRISVPPQTGDVPLQTLYNLNGDVIAWGFKATSNVVKVTFHNPGVQEDPACGPLLDAIAIREFYPPMPTRVNLVKNPGFEEGPFPIFNSTNGVLLPPQQQDGFSPLPGWIIESLKAVKFIDSKHFNVPFGLGAVELVAGRESAIAQVIRTDTNKVYNITFSVGDAKNGCNGSMMVEAFAAKDTFKVPFKSEGKGTFRTVSFKFKAIAKRTRLTFYSSFYHTRSDDYGSLCGPVIDQVIVFPVA

SEQ ID NO: 139 - DNA, 1161 bp, Sorghum bicolor
atggagcttccatggggaatgctgctgctgctggtcctctccgtctcctcctcgtcctcctcctcggctgccgccacgctcgccgtcagtgctccgcccccagtgcctgcgcctcgtcatgctcaagacgctgaagggctgctcatcaacggcaactttgagacggcgccgaggaagctgaacaagacccttatcgtgggccgtcactcgctgcccggatggacggtgcagggtcacgtggagtacgtctcgggcgggccgcagccagggggcatgttcttcgcggtgccgcacggcgtgcacgcgctccgcctcggcagccgcgcgtccgcgtcgcagaacgtgacggtgcgtccgggcgcactatacgcgctgacgttcgcggcgacgcggacgtgcgcgcaggacgagtccctgcgcgtggccgtgtcgccgtcgctctcggcgcccgccgacgtcgccgtgcgcacgctctacagcggcgcgtccgccgacacctgggcctggggtttccgcgcctcctcccccgtcgcgcaggtcacgttcgccaatcccggcgtgcaggaggacgccgcgtgcggcccgctgctggacgccgtcgccatcaaggagctgcccgctgcgtacccgaccaaagacaacctgatcaagaacgatgggttcgagatcggtccccaggtgctgaagaactcgacggtgggcgtgcttcttcccccgaagcagaaggacgcgacgtcgccgcttcccgggtggatcatcgagtcgctcaaggcggtgcggttcatcgacgcggcccacttctccgtcccggcggggcagtacgcggtggagctggtggccgggcgggagagcgccatcgcgcaggtgatccgcaccgtgccgaaccgcgcctacaacctgtcgttcgccgtcggcgacgccaagaacgggtgccacgggtccatgctggtggaggcgttcgcgggcaacgtgacgcagaaggtgccgttcgagtccgcggggaaaggtgggttcaaggcggcggcgttcaggttcgtggccgccggagcacggacccgcctcacgttctacagctcctactaccacaccaaggtcaccgacggcgtctcgctctgcggccccgtgctggaccaggtcaaggtcgtgcccgtgaaggcgtag

SEQ ID NO: 140 - protein, 386 aa, Sorghum bicolor
MELPWGMLLLLVLSVSSSSSSSAAATLAVSAPPPVPAPRHAQDAEGLLINGNFETAPRKLNKTLIVGRHSLPGWTVQGHVEYVSGGPQPGGMFFAVPHGVHALRLGSRASASQNVTVRPGALYALTFAATRTCAQDESLRVAVSPSLSAPADVAVRTLYSGASADTWAWGFRASSPVAQVTFANPGVQEDAACGPLLDAVAIKELPAAYPTKDNLIKNDGFEIGPQVLKNSTVGVLLPPKQKDATSPLPGWIIESLKAVRFIDAAHFSVPAGQYAVELVAGRESAIAQVIRTVPNRAYNLSFAVGDAKNGCHGSMLVEAFAGNVTQKVPFESAGKGGFKAAAFRFVAAGARTRLTFYSSYYHTKVTDGVSLCGPVLDQVKVVPVKA

SEQ ID NO: 141 - DNA, 1197 bp, Sorghum bicolor
atggagccagattcggcgaggaagaggctcgcattgctggctctgcttctcctcctggcggcgcccgcccggccggcctcggcggctccggtggaggatggcctgctcagcaatggcgactttgagacagcaccagccggtggttttgtaaaatctgcgtctgttgctgagggtgcatcgtcaatccctggttggacgatcaatggcacggttgagctcatttcagcaggccagcaccagggtggcatgatcctgattgttccacagggggaccatgctgtaaggctagggaatgatgctagtgttggtcaggtggtggacgttgagaagggctcggaatatgctatcacattcagcgctgcccggacatgtgcgcaactggagtcactgaatgtttctgtgctaggtggcatatcccagacagtagacttgcagacattgtacaacatagaaggctgggacgcgtatgcactggcttttcaggcgacggaagagcaggcacatcttcaattcatgaaccctggcatggaggatgatccaacttgtggtcctatcctagacaacgttgccgtcaagaagctcttcactccggacaaaccgaaggataacgtggtgctgaatggagactttgaggagggtccatggatgttcccgaacacgagctttggcgtgctgctcccaactaaccttgacgagcagacatctgccatacctggttggatgatcgagtcaaaccgcgctgtccgctacattgactctgatgagtacaaggttccccaggggaagcgtgccattgagcttctgtcaggcaaggagggtatcatctcccagatggttgagacgacccctcagaaggtttacagcctgacgttcacactgggcacggcaggggactcgtgccaaccaccaatggccatcatggcgttcgccggggatcaggcccagaacttccactactccccaataggcaacgccaccagccaggctgcgaatgtgacgttcactgcacgtgctgagagaacacgtgtggcattctacagcgtgtactacaacacgaggagtgacgaccacagctctctgtgtgggccggtgatcgacgatgtccgggtatggggcttgaacgcagcggctgggttgaaggcaagtattggactcgttcttggcattgttggtctcgctggcatggtgctcttctga

SEQ ID NO: 142 - protein, 398 aa, Sorghum bicolor
MEPDSARKRLALLALLLLLAAPARPASAAPVEDGLLSNGDFETAPAGGFVKSASVAEGASSIPGWTINGTVELISAGQHQGGMILIVPQGDHAVRLGNDASVGQVVDVEKGSEYAITFSAARTCAQLESLNVSVLGGISQTVDLQTLYNIEGWDAYALAFQATEEQAHLQFMNPGMEDDPTCGPILDNVAVKKLFTPDKPKDNVVLNGDFEEGPWMFPNTSFGVLLPTNLDEQTSAIPGWMIESNRAVRYIDSDEYKVPQGKRAIELLSGKEGIISQMVETTPQKVYSLTFTLGTAGDSCQPPMAIMAFAGDQAQNFHYSPIGNATSQAANVTFTARAERTRVAFYSVYYNTRSDDHSSLCGPVIDDVRVWGLNAAAGLKASIGLVLGIVGLAGMVLF

SEQ ID NO: 143 - DNA, 1110 bp, Solanum lycopersicum
atggcttccttcttttcactttcttttatattaattttctctttatacaacagctttgcttatgctaatactgttccatatcttgatgatctactagaaaatggaaactttgaacaagggccaaaaccatcaaacatgaataaaacagtgatcataggcaaacactccttacccaaatgggaaatcaatagcatagtggagtgggtgtccggtgggccccaggaaggcggattctacttcccgatccctcgtggggcccacgcagtccgactagggaacgaggcttccatctctcaatatgtgaaggtgaaaccaaacacaatatattcactcacatttggagccactaggacttgtgctcaagatgaggtccttaccgtctccgcgggaggcatgtctagtgatcttaacattcaaacattgtacagtgctgatggtggtgacacttatgcttggggtttcaaatcaacatctaatcttgttaaggtcacatttcacaatcctggtactcaagaagatccaacatgtggaccacttatagaccatgttgcaatcaaggaaatgcttatggcaacatatactaaaggtaacttggtgaaaaatggtggatttgaactaggtcctcatgtattcaagaacttttcgacaggggtactcgtcctgcctttaaaacaggacaagtactcaccaattccaggatggatggttcagtttgcaaaaccatcaaaatacatagactcgaagcatttcttcgtgccttcaggaaatgcagctgttgaattgataggaggaagggaaacaggcattgcacagacgatacgtacaatcccaaaacagttctacaacctgactttcaccataggcgatgcacagaacagttgccacggaacaatgacagttcaagcatttgctggaaaggctagtacacaagttaccttcgtatcgaatggaaaaggatggtccaagactgcaaccttcaagttccaggctgattcaattagaacaacaatagctttctacaatccatactatcacacgaagatacacgattttggacacatgtgtggacctgttatcgatgatgttagtcttgttcatgttcgtaaataa

SEQ ID NO: 144 - protein, 369 aa, Solanum lycopersicum
MASFFSLSFILIFSLYNSFAYANTVPYLDDLLENGNFEQGPKPSNMNKTVIIGKHSLPKWEINSIVEWVSGGPQEGGFYFPIPRGAHAVRLGNEASISQYVKVKPNTIYSLTFGATRTCAQDEVLTVSAGGMSSDLNIQTLYSADGGDTYAWGFKSTSNLVKVTFHNPGTQEDPTCGPLIDHVAIKEMLMATYTKGNLVKNGGFELGPHVFKNFSTGVLVLPLKQDKYSPIPGWMVQFAKPSKYIDSKHFFVPSGNAAVELIGGRETGIAQTIRTIPKQFYNLTFTIGDAQNSCHGTMTVQAFAGKASTQVTFVSNGKGWSKTATFKFQADSIRTTIAFYNPYYHTKIHDFGHMCGPVIDDVSLVHVRK

SEQ ID NO: 145 - DNA, 1104 bp, Solanum lycopersicum
atggtgttcaaagtttcagttttgattcttttctcatttctcttcacagcctctgctgttcgcccagctcctcctcttgaaggattacttccaaatggtaattttgaagagctaccaaaggcaaaagacctcaagaagaaaacagtgcttcaaggtaaatatgctttgcccaaatgggagattaatggcttagtggagtatatttctggcgggcctcagcccggtgggatgtactttgcagtcgcccacggtgtccacgctgtgaggcttgggaatgaggcttcaatttctcagacaattccagtcaagaaaggctctttgtatgcacttacttttggggcatcaagaacttgtgctcaagaagaggtgttgagggtgtcagtgcctcctcaaacaggagaccttcctttgcagaccctttatagcagcaatggtggtgatacttatgcttggggtttctacgccacctctaatgttgttaaaattacctttcataatcctggagttcaagaggatcctgcttgtggtccactcttggatgctgttgctatcaaagaactttttccacctcgccctacaagagtgaacttggttaaaaatgctggttttgaagaaggacctcacctcttgataaactcttcacatggagttctcctccctcccaagcaggaagatttgacatccccacttccaggatggatcattgagtcactcaaagcagtgaaattcttggattcagctcatttcaatgtcccgtttggccaagctgcagtggaacttcttgcagggagagaaagtgccctcgcgcaaatcattaggacggtccctaagaaggtctacgccttcacattctctgttggtgatgcaaagaatggttgtcatggtgatatgatggttgaagcatttgctgctaaagaaacgttcaaagttcccttcaaatcacaaggcaaaggcagcttcaaaactgttagtttcaagttcacagctattgcagacagaaccagaattactttctacagttctttttaccacacaaagatcaatgactatggcgctctttgtggccctgttgttgatgaagttaaggtgacccctgttgcttag

SEQ ID NO: 146 - protein, 367 aa, Solanum lycopersicum
MVFKVSVLILFSFLFTASAVRPAPPLEGLLPNGNFEELPKAKDLKKKTVLQGKYALPKWEINGLVEYISGGPQPGGMYFAVAHGVHAVRLGNEASISQTIPVKKGSLYALTFGASRTCAQEEVLRVSVPPQTGDLPLQTLYSSNGGDTYAWGFYATSNVVKITFHNPGVQEDPACGPLLDAVAIKELFPPRPTRVNLVKNAGFEEGPHLLINSSHGVLLPPKQEDLTSPLPGWIIESLKAVKFLDSAHFNVPFGQAAVELLAGRESALAQIIRTVPKKVYAFTFSVGDAKNGCHGDMMVEAFAAKETFKVPFKSQGKGSFKTVSFKFTAIADRTRITFYSSFYHTKINDYGALCGPVVDEVKVTPVA

SEQ ID NO: 147 - DNA, 1194 bp, Saccharum officinarum
  misc_feature (1166)..(1166): n is a, c, g, or t
atggagccagattcggcgaggaagaggctcgcattgctggcgctgctgctcctggcggcgcccgcctgcccggcctcggcggctccggtggaggatggcctgctcagcaatggtgactttgagacagcaccagtcggtggttttgtaaaatctgcgtctgttgctgagggtgcatcgtcaatccctggttggacgatcaatggcacggttgagctcatttcagcaggccagcaccagggtggcatgatcctgattgttccacagggggaccatgctgtaaggctagggaatgatgctagcgttgggcaggtggtggacgttgagaagggctcagagtatgctatcacattcagcgctgcccgaacatgtgcacaactggaggcactgaatgtttccgtgctaggtggcgtatcacagacagtagacttgcagacattgtacaacatagaaggctgggatgcgtacgcgttggcttttcaggcaacggaagagcaggcacatcttcaattcatgaaccctggcatggaggatgatccaacttgtggtcctatcctagacaatgttgccgtcaagaagctcttcactccagacaaaccaaaggataacgtggtgctgaatggagactttgaggagggtccatggatgttcccgaacacgagctttggcgtgctgctcccaactaaccttgacgagcagacatctgccatacctggttggatgatcgagtcaaaccgcgccgtccgctacatagactctgatgagtacaaggttccccaggggaagcgtgccattgagcttctgtcaggcaaggagggtatcatctcccagatggttgagacgacccctcagaaggtttacagcctgacgttcacactgggcacggcgggggactcgtgccaaccaccaatggccgtcatggcattcgcgggggatcaggcccagaacttccactactccccaatgggcaacgccaccagccaggctgcgaatgtgacgttcactgcacgtgctgagagaacacgtgtggcattctacagcgtgtactacaacacgaggagtgacgaccacagctcactgtgtggaccggtgatcgacgacgtccgggtatggggcttgaacgcagcggctgggttaaaggcaagtattggactggttcttggcattgntggtgtcgttggcatggtgctgttctga

SEQ ID NO: 148 - protein, 397 aa, Saccharum officinarum
  misc_feature (389)..(389): Xaa can be any naturally occurring amino acid
MEPDSARKRLALLALLLLAAPACPASAAPVEDGLLSNGDFETAPVGGFVKSASVAEGASSIPGWTINGTVELISAGQHQGGMILIVPQGDHAVRLGNDASVGQVVDVEKGSEYAITFSAARTCAQLEALNVSVLGGVSQTVDLQTLYNIEGWDAYALAFQATEEQAHLQFMNPGMEDDPTCGPILDNVAVKKLFTPDKPKDNVVLNGDFEEGPWMFPNTSFGVLLPTNLDEQTSAIPGWMIESNRAVRYIDSDEYKVPQGKRAIELLSGKEGIISQMVETTPQKVYSLTFTLGTAGDSCQPPMAVMAFAGDQAQNFHYSPMGNATSQAANVTFTARAERTRVAFYSVYYNTRSDDHSSLCGPVIDDVRVWGLNAAAGLKASIGLVLGIXGVVGMVLF

SEQ ID NO: 149 - DNA, 1176 bp, Solanum tuberosum
atggaaatagcttcgagctcaacaaaattcaaatgggtcactgcatttcttcttcttcttacttgctcagctgctggacaagttcaagatggctcgttagttaacggtaattttgagaccccgccgtcaggcggtttctcttccggcgacggattctccgacgggccatccgaaatccccagctggaaatcaaacggcacagtagaggtagtggaatccgggcaaaaacagggtggaatgatcctcatcgtaccacaaggtagacacgcagttcggcttggaaacgacgccgagataagccaagagctcaaagtagagaaaggctccatttactcaatcactttcagcgcggctcgcacgtgcgctcagctagagtcactcaacgtttcagttcctccggcctcacagaccattgatcttcaaactctgtataatgttcagggctgggattcctacgcgtgggcctttcaggctgaagaagatgacgtgcgggtcgtttttacaaatcctggcatggaagatgaccccacttgtggacccattattgatgatattgctatcaagaagcttttcgttccagctaagtcaaaaaataatgcagtacttaatggagactttgaagaaggtccatggatgtttaggaatacttctctcggtgttcttcttccaaccaacctcgacgaggaaacatcatcgctccctggttggatagttgaatcaaatcgagcagttcgatacatcgatacatatcacttcacagttccagaagggaagagagcaatagaattgctttcaggaaaagaaggcattatatcccagatggttgaaaccaagcctaataagccatacagattgacatttttgtttgggcatgcaggggattcatgcaaggaaccactagcaattatggcctttgccggtgatcaagctcaagacatccattacactcccaatttcaattcttcatttcagaatgctaacctgaatttcacggccaaggcggacaggacacgtatcgcgttctatagtatctattacaatacaagaagtgatgatatgagctctctttgtggacctgttgtagatgatgtgagggttgaattgtctgcgtctagcagagtcaaggttttcgggtttgggtttatgttttggttgttagtcttagttttgggctaa

SEQ ID NO: 150 - protein, 391 aa, Solanum tuberosum
MEIASSSTKFKWVTAFLLLLTCSAAGQVQDGSLVNGNFETPPSGGFSSGDGFSDGPSEIPSWKSNGTVEVVESGQKQGGMILIVPQGRHAVRLGNDAEISQELKVEKGSIYSITFSAARTCAQLESLNVSVPPASQTIDLQTLYNVQGWDSYAWAFQAEEDDVRVVFTNPGMEDDPTCGPIIDDIAIKKLFVPAKSKNNAVLNGDFEEGPWMFRNTSLGVLLPTNLDEETSSLPGWIVESNRAVRYIDTYHFTVPEGKRAIELLSGKEGIISQMVETKPNKPYRLTFLFGHAGDSCKEPLAIMAFAGDQAQDIHYTPNFNSSFQNANLNFTAKADRTRIAFYSIYYNTRSDDMSSLCGPVVDDVRVELSASSRVKVFGFGFMFWLLVLVLG

SEQ ID NO: 151 - DNA, 1185 bp, Triticum aestivum
atggagcgagggctcgcattgctgggtctggggctggcgcttcttctgctggcgccctctcgtcgtctcgcctcggccgctccggtggaggacggcctgctcatgaatggtgatttcgagacagcaccacctggcggtttcgtcaaatcggcttcagtttccgagggcgcggcgatcccaagctggacgatcaatggaacagttgagctcatttccgcaggccagcaccagggtggcatgatccttattgttccacaaggggatcatgctgtgcggctagggaatgatgcaggcattgggcaggtggtggaggttgagaagggctcagagtacgcgatcacattcagtgccgcccggacctgcgcgcagctggagtcactgaacatctccgccgggagcgtatcacagacagtcgacttgcagacactttacagcatagaaggctgggatgcatatgccctggctttccaagcagtggatgagcaggcgagcattgagtttaggaaccctggcatggaggacgacccgacctgcgggcctatccttgacaacgtggccatcaagaagctcttctcccccgacaaagcaaaggagaacatggtgatcaatggagactttgaggaggggccatggatgtttccaaacacaagcttcggtgtcctgctcccgacgaaccttgacgagcagacgtcggccttgccagggtggatgatcgagtcgaaccgcgcagtccgcttcgtcgactccgaccagtacaccgtgccccaggggaagcgcgccatcgagcttctctccggcaaggagggcatcatctcgcagatggtggagacgacccctcagaaggcgtacaccctgacgttcacgctgggctcggcaggcgactcgtgccagccgccaatggctgtcatggcattcgccggcgaccaggcccagaacttccactactcccccatgggcaacgccacgagccaggccgtgaacgtgaacttcacggcgcgcgccgagaggacacgcgttgcgctctacagcgtctactacaacacgagaagcgacgaccacagctcgctctgcgggccggtgatagacgacgtccgtgtctggggcttgaatggggctgctgggttgaaggcaagtattgcgctgcttattgccatggctagtgtcatcgttctcgtgctgttctga

SEQ ID NO: 152 - protein, 394 aa, Triticum aestivum
MERGLALLGLGLALLLLAPSRRLASAAPVEDGLLMNGDFETAPPGGFVKSASVSEGAAIPSWTINGTVELISAGQHQGGMILIVPQGDHAVRLGNDAGIGQVVEVEKGSEYAITFSAARTCAQLESLNISAGSVSQTVDLQTLYSIEGWDAYALAFQAVDEQASIEFRNPGMEDDPTCGPILDNVAIKKLFSPDKAKENMVINGDFEEGPWMFPNTSFGVLLPTNLDEQTSALPGWMIESNRAVRFVDSDQYTVPQGKRAIELLSGKEGIISQMVETTPQKAYTLTFTLGSAGDSCQPPMAVMAFAGDQAQNFHYSPMGNATSQAVNVNFTARAERTRVALYSVYYNTRSDDHSSLCGPVIDDVRVWGLNGAAGLKASIALLIAMASVIVLVLF

SEQ ID NO: 153 - DNA, 1158 bp, Theobroma cacao
atgacaatggctacttcattcttgcttgtttgcaccttattggtcactgggtgtgctttaggtccgaaaccttttgtttcagcaaagagaggtgttagaccttatggttcagcaaaaatcgctgctaaaccttttgaaggataccttgaaaatggcaactttgaggaacagccaaaaccaacagacctaaaaaaaacagtacttctaggaaaatatgcacttcctaaatggaccatcagcggtttagtggagtacatcactggtgggccgcaacctggtggcatgtttttccctgtggctcacggtgtccatgccgtgaagcttggcaatgaggcctcaatttctcaaaccataccagtaaaaccaggcaccctttatgcactgacatttggtgcatcaagaacttgtgcgcaagatgaggtgttgagagtctcagtgcctgcccagtcaggggacctccctttgcagaccttgtacagtagctatggcgatgatgtttatgcttgggggtttatagccaaatccaagtatattacagtaacatttcacaaccctggcgttcaagaggatcctacctgtggtccactgttggatgcagttgctattaaggaggttgtccgtccaatgcctacaagaggtaatctggtcaagaacccaggctttgaagaaggtcctcatcgcctagtaaactctacaaatggtgtcttactccctcctcgccaggaggattcaacatcccctctgccgggctggatcatcgaatcacttaaagctgtgaagttcattgattcaaagcacttcaacgtccctgctggaaaggctgcagttgagcttgttgcagggagagaaagtgccattgcccagattttcagaactgtccccaaccaattatatgacctaacgttcatcattggagatgcttggaatggttgccatggagaaatgatggttgaggcatttgctgacaaaaataccgtcaaagttcccttcacatctcgaggaaagggtgaattcaagactgcaagcttgaagttcaaagcagttacagccaggacaaggatcacatttttcagcttttactaccacacaaggattaatgactttggatcactttgcggccctgttttggatgaagttcgggtttcccctgttgcttag

SEQ ID NO: 154 - protein, 385 aa, Theobroma cacao
MTMATSFLLVCTLLVTGCALGPKPFVSAKRGVRPYGSAKIAAKPFEGYLENGNFEEQPKPTDLKKTVLLGKYALPKWTISGLVEYITGGPQPGGMFFPVAHGVHAVKLGNEASISQTIPVKPGTLYALTFGASRTCAQDEVLRVSVPAQSGDLPLQTLYSSYGDDVYAWGFIAKSKYITVTFHNPGVQEDPTCGPLLDAVAIKEVVRPMPTRGNLVKNPGFEEGPHRLVNSTNGVLLPPRQEDSTSPLPGWIIESLKAVKFIDSKHFNVPAGKAAVELVAGRESAIAQIFRTVPNQLYDLTFIIGDAWNGCHGEMMVEAFADKNTVKVPFTSRGKGEFKTASLKFKAVTARTRITFFSFYYHTRINDFGSLCGPVLDEVRVSPVA

SEQ ID NO: 155 - DNA, 1176 bp, Taraxacum officinale
atggcttcacactcagcaacaaccaaatcgttagcactattctgccttctattctctcatttcgttgctgtttttacagcagaagacggcttactaataaacggcgacttcgagacaccgccatcgggaggtttcgccgacgaaggactcggcgacaaccccaacgcaattccgagctggaaagtcaacggcacagtggaactagtcgcctccggtcaaaaacaaggcggaatgatcctaatcgtaccagaaggtcgacacgcagtgagactcggcaacgacgcccaaatcacgcaagaattaaaattagaaaaaggcgaaatctactcaattactttcagtgcatctcgcacgtgtgcacagctggagtcgctaaacgtgtcggttccacctgcgtcacagacgatcgatttgcagacgttgtatagcgttcaagggtgggatacgtacgcgtgggcttttcaggcggatgaagaagacactcatgtcgtttttacaaatcctggcatggaagatgaccccacttgtgggcccatcattgatgatattgctattaaaaagcttttccaacccactaaaccaaaagataacgcagtactaaacggagacttcgaagaaggcccatggatgtttagaaacgcgtctctgggcgtcctgctcccaacaaacctggatgaagaaatctcatccctacctggttggatagtcgagtccaaccgggcagttcgttacatagacgcaaaccacttctcagtcccgggcggcaaacgcgccctggaactgctctcaggcaaagaaggcataatctcacaaatggtcacaaccaccccaaacaaaccctacagaatgtcgttttcgcttggtcacgctgctgacatgcgcaagcaaccgcttgcagtcatggcattcgcaggtgaccaggcggaaaacattcactatgcaccaaatgggaattcgagtttccaaactgtgaatgtgaattttacggctaaggctgagaggacgcgtgtggcgttttatagtgtttattataatacgagaagtgatgatatgagttctttgtgtgggcccgtggttgatgatgtggcggtggttgtttcgaaggggggtagggggttagggttttcggttttagggtttgggttggtggttttggttgtgttgtttgttgtttag

SEQ ID NO: 156 - protein, 391 aa, Taraxacum officinale
MASHSATTKSLALFCLLFSHFVAVFTAEDGLLINGDFETPPSGGFADEGLGDNPNAIPSWKVNGTVELVASGQKQGGMILIVPEGRHAVRLGNDAQITQELKLEKGEIYSITFSASRTCAQLESLNVSVPPASQTIDLQTLYSVQGWDTYAWAFQADEEDTHVVFTNPGMEDDPTCGPIIDDIAIKKLFQPTKPKDNAVLNGDFEEGPWMFRNASLGVLLPTNLDEEISSLPGWIVESNRAVRYIDANHFSVPGGKRALELLSGKEGIISQMVTTTPNKPYRMSFSLGHAADMRKQPLAVMAFAGDQAENIHYAPNGNSSFQTVNVNFTAKAERTRVAFYSVYYNTRSDDMSSLCGPVVDDVAVVVSKGGRGLGFSVLGFGLVVLVVLFVV

SEQ ID NO: 157 - DNA, 1182 bp, Populus trichocarpa
atgtttcaaagctcaacaagaagcaaatggttcactttgtttatgctcgtctttgctctttttgcttctgcaatacttggagaagatgggttggtgacaaacggtgattttgaaacgccaccaatcactggcttccccaaagacgaggccctggttgaagggcccaccgaaattccagggtggaaaacaaacggcaccgtagagctggtatcctccggacagaaacaaggtgcgatgatcctcattgtaccacgaggtgcacacgcagtaagattggggaacgacgctgatatcagccaggaattgacggtcgagaagggatctgtatactcggtcacgttcagtgcggctcgcacgtgcgcgcagctggaatctctaaacgtgtcagtgctacctgcatcacagaccatagacctgcagacattgtataatgtgcaagggtgggacccatacgcgttggcttttgaggcacaggaggataaagtgaggctggttttctcgaatcccggcatggaagatgaccctacttgtgggcctattatcgatgatattgcgatcaaaaagcttttcactcctgagcgacccaaagacaatgcagtaattaatggtgattatgaggaaggcccctggatgtttaataacgtttcactcggagtcctgctcccaaccaaactggatgaggaaacgtcgtcgttgcccggttggattatcgaatcatacagggctgtccgctacatagactcttatcattactccgttccacaaggcaagcgtgccattgaattgctctcaggcaaggaaggcataatctcacagatggttgaaacaacacccagcaagccttacacgatgtcgtttgccttgggccatgccggggacaaatgcaagcagccacttgcagtcatggccttcgccggtgatcaggcccaaaatatccattacacacccgactccaactccaccttccaggttgctaacctcaacttcacagccaaggccgacaggacccgtattgcattttatagcgtgtactacaataccaggagtgatgatatgagctcgttgtgtgggccagtggtggacgatgttcgggtatggttttcaggggcaagaaggattggatttggggggcttggtttggggcttgggctgtgggtgtctgttttggctctgctttattaa

SEQ ID NO: 158 - protein, 393 aa, Populus trichocarpa
MFQSSTRSKWFTLFMLVFALFASAILGEDGLVTNGDFETPPITGFPKDEALVEGPTEIPGWKTNGTVELVSSGQKQGAMILIVPRGAHAVRLGNDADISQELTVEKGSVYSVTFSAARTCAQLESLNVSVLPASQTIDLQTLYNVQGWDPYALAFEAQEDKVRLVFSNPGMEDDPTCGPIIDDIAIKKLFTPERPKDNAVINGDYEEGPWMFNNVSLGVLLPTKLDEETSSLPGWIIESYRAVRYIDSYHYSVPQGKRAIELLSGKEGIISQMVETTPSKPYTMSFALGHAGDKCKQPLAVMAFAGDQAQNIHYTPDSNSTFQVANLNFTAKADRTRIAFYSVYYNTRSDDMSSLCGPVVDDVRVWFSGARRIGFGGLGLGLGLWVSVLALLY

SEQ ID NO: 159 - DNA, 1182 bp, Populus trichocarpa
atgtttcaaagctcaacaagaagcaaatggttcactttgtttatgctcgtctttgttctttttgcttctgcaatacttggagaagatgggttggtgacaaacggtgattttgaaacgccaccaatcactggcttccccaaagacgaggccctggttgaagggcccaccgaaattccagggtggaaaacaaacggcaccgtagagctggtatcctccggacagaaacaaggtgcgatgatcctcattgtaccacgaggtgcgcacgcagtaagattggggaatgacgctgatatcagccaggaattgacggtcgagaagggatctgtatactcggtcacgttcagtgcggctcgcacgtgcgcgcagctggaatctctaaacgtgtcagtgctacctgcatcacagaccatagacctgcagacattgtataatgtgcaagggtgggacccatacgcgttggcttttgaggcacaggaggataaagtgaggctggttttctcgaatcccggcatggaagatgaccctacttgtgggcctattatcgatgatattgcgatcaaaaagcttttcactcctgagcgacccaaagacaatgcagtaattaatggtgattatgaggaaggcccctggatgtttaataacgtttcactcggagtcctgctcccaaccaaactggatgaggaaacgtcgtcgttgcccggttggattatcgaatcatacagggctgtccgctacatagactcttatcattactccgttccacaaggcaagcgtgccattgaattgctctcaggcaaggaaggcataatctcacagatggttgaaacaacacccagcaagccttacacgatgtcgtttgccttgggccatgccggggacaaatgcaagcagccacttgcagtcatggccttcgccggtggtcaggcccaaaatatccattacacacccgactccaactccaccttccaggttgctaacctcaacttcacagccaaggccgacaggacccgtattgcattttatagcgtgtactacaataccaggagtgatgatatgagctcgttgtgtgggccagtggtggacgatgttcgggtatggttttcaggggcaagaaggattggatttggggggcttggtttggggcttgggctgtgggtgtctgttttggctctgctttattaa

SEQ ID NO: 160 - protein, 393 aa, Populus trichocarpa
MFQSSTRSKWFTLFMLVFVLFASAILGEDGLVTNGDFETPPITGFPKDEALVEGPTEIPGWKTNGTVELVSSGQKQGAMILIVPRGAHAVRLGNDADISQELTVEKGSVYSVTFSAARTCAQLESLNVSVLPASQTIDLQTLYNVQGWDPYALAFEAQEDKVRLVFSNPGMEDDPTCGPIIDDIAIKKLFTPERPKDNAVINGDYEEGPWMFNNVSLGVLLPTKLDEETSSLPGWIIESYRAVRYIDSYHYSVPQGKRAIELLSGKEGIISQMVETTPSKPYTMSFALGHAGDKCKQPLAVMAFAGGQAQNIHYTPDSNSTFQVANLNFTAKADRTRIAFYSVYYNTRSDDMSSLCGPVVDDVRVWFSGARRIGFGGLGLGLGLWVSVLALLY

SEQ ID NO: 161 - DNA, 1104 bp, Triphysaria sp.
atggctcgttttttccttttcatactcttaatctcatgcaacaatttagcttctgcaatagtttatccacctccacttgatgggctacttgaaaatggaaactttgaacgaggccctaaccctagatacctgaggaaaacagtgatcatcggaaaacactctctcccgggatgggaaatcagtggcctcgtcgagtatgtctccggtgggccccagccagggggcttctacttcgccgtcccacgtggagtccacgcggtgaggctcggaaacgaggcctccgtgtcgcagcacgtcaagaatctgaaaccgggggcgatctacacgctcacgtttggggcaacgaggacttgtgcacaacatgaggagctcacggtttcggtccccgggttgttgagccgtctcccgatccaaacgttgtatggcacggacggaggggacacgtacgcgtggagcttcaaggcgagttcgaatatggttaaagtcacgtttcataatcatggtacacaagaggatccggcgtgtggaccgcttttagatgccattgctatcaaggaaatgcagcccctgagatacacaagaggaaacttggtgaaaaacgggggattcgaaatcggcccacacactttcaagaacttctccaccggtgtccttgtcctcccgaagggccaagacttgtactcgccgatcccgggatggatagtcgagtcacttaaaccggtcaaatacatcgactcgagacatttcattgtacccgtcggactagcagcaatcgagttggtgggagggagagaaaccgccatttcacagatcatcaggacacagcctaacaaaatgtatagtctctcattcaccattggagatgcaaagaatggatgtaacgggacgatgacagttgaagcttttgcggggaggaatagtttgaaagtcccgtttacgtcccatggaaagggttggtttaagaaagctagtcttgggtttcaagcggtttcggcgaggactagaattacgttctatagtccattttatcataccaggttgtatgattttggtcatatgtgtggccctgttttggatgatgttaaggttgttccagtagcttag

SEQ ID NO: 162 - protein, 367 aa, Triphysaria sp.
MARFFLFILLISCNNLASAIVYPPPLDGLLENGNFERGPNPRYLRKTVIIGKHSLPGWEISGLVEYVSGGPQPGGFYFAVPRGVHAVRLGNEASVSQHVKNLKPGAIYTLTFGATRTCAQHEELTVSVPGLLSRLPIQTLYGTDGGDTYAWSFKASSNMVKVTFHNHGTQEDPACGPLLDAIAIKEMQPLRYTRGNLVKNGGFEIGPHTFKNFSTGVLVLPKGQDLYSPIPGWIVESLKPVKYIDSRHFIVPVGLAAIELVGGRETAISQIIRTQPNKMYSLSFTIGDAKNGCNGTMTVEAFAGRNSLKVPFTSHGKGWFKKASLGFQAVSARTRITFYSPFYHTRLYDFGHMCGPVLDDVKVVPVA

SEQ ID NO: 163 - DNA, 1104 bp, Triphysaria sp.
atgtcactgaaacctactctcttgcttgttctttgttttctctacactgctgctgctcttgttccacctcttccttttgaagggcttctaccaaatggcaacttcgaagagaaaccaaaacccacaagcctccacaaaacaaagctcctaggcaaaaacgcccttcccaaatggcaaatcaagggcctcgtcgaatacatctccggcgggccacagcccggcggaatgttcttcgccgtagcccacggcatccacgccgttcgcctcggcaacgaggcctccatatcccagacaatctccgtcaagagtgggtccctatacgcgctcactttcggcgcgtcgagaacgtgcgcgcaagacgaggtgctccgattgtcggtgggccctcaaacaggggatctgcctctgcaaaccctgtatagcagcaacggcggggacacatacgcttgggggtttagagctacttctaagaatgtaacggtgtcgttttctaaccccgggaagcaagaggacccggcgtgtggcccccttttggacgccgttgcgattaaagagcttttccctccgatgcccacaagaggtaacctggtcaagaacggtggttatgaagagggcccacatcgctttctcaactcttcggtcggtgttctcctcccaccgaaacaacaagactcgacctccccgctccctggctggatcattgagtccctaaaggccatcaaatatattgacgccaagaattttaacgtccctcatgggaaagccgcggtcgagctactcgcgggccgagagagcgccattgcccaaatcatccgaaccgtccctaacaaatcatacgacctcacgttcgtaattggggatgccaagaacgggtgtcacggatcaatgatggtcgaagcctttgccgctaaagaagcgatgaaagctccttttcaatcccgagggaaaggggagtttaaggcttatagttttaagttcactgcggtgtcgttgaggacgagattgactttctatagctcgttctaccataccaagatcgatgaccttggaagtctttgtggtccggttcttgatgaggttcgtgttttaccttccaaggcttaa

SEQ ID NO: 164 - protein, 367 aa, Triphysaria sp.
MSLKPTLLLVLCFLYTAAALVPPLPFEGLLPNGNFEEKPKPTSLHKTKLLGKNALPKWQIKGLVEYISGGPQPGGMFFAVAHGIHAVRLGNEASISQTISVKSGSLYALTFGASRTCAQDEVLRLSVGPQTGDLPLQTLYSSNGGDTYAWGFRATSKNVTVSFSNPGKQEDPACGPLLDAVAIKELFPPMPTRGNLVKNGGYEEGPHRFLNSSVGVLLPPKQQDSTSPLPGWIIESLKAIKYIDAKNFNVPHGKAAVELLAGRESAIAQIIRTVPNKSYDLTFVIGDAKNGCHGSMMVEAFAAKEAMKAPFQSRGKGEFKAYSFKFTAVSLRTRLTFYSSFYHTKIDDLGSLCGPVLDEVRVLPSKA

SEQ ID NO: 165 - DNA, 1104 bp, Vitis vinifera
atggctctgtttctctcactctgccttgtgttcttctctatcgtctgcagctctgcttctgcaactcttcctccatatcttgatgggcttcttccaaatggggactttgagaaagggcccaaggcgtcaaatctgaagaagacagtgataaaagggaagcactcactcccggactgggagatcaagggcttggtggagtatgtttcaggtgggccgcagccaggtgggttcttcctggctgttcctcgtggggtacatgcagtgaagcttgggaatgaggcttcgatctctcagaatgttcgagtgaggcctggcttcatctactcgctcacctttggggccactaggacttgtgcccaagacgaggtgttgagggtgtccatccctggtcaatcggcagatctccctatccagactctgtatagtactgatggtggagacacctatgcttgggctttcaatgccaccacagaagttgtcaatgtcacattccacaaccctgggattcaagaggatcgcacctgtggacccctgttggatgctattgcaattaagcagatgccacctctcaagcttaccagaggtagtctagctaaaaatggaggatatgaaactggcccacacgtgttcaagaacttctcaactggggtcctcctccttcccaagcaacaagacctgatctcaccactccctggatggatcattgagtccctcaaaccagtgaaatacatagattcaaagcacttctcagtccccacaggacttgctgcaattgagctgattggagggagagaaagtgccattgcccaaatcataaggacagtgcccaacaaatcctacaacctcacatttactattggagatgccaagaatggctgccatggatccatgacggtcgaggcttttgcagctaaggaaactgtcaaagtcccccatgcatctcaaggcaagggtgagttcaaggctgcaagtctcaaattcaaagcactttcagctagaacaaggataacattctacagtgcctattaccataccaagcttcatgactttggtcatatgtgtggccctgttttggatgatgttagggtctatcccgtctcttaa

SEQ ID NO: 166 - protein, 367 aa, Vitis vinifera
MALFLSLCLVFFSIVCSSASATLPPYLDGLLPNGDFEKGPKASNLKKTVIKGKHSLPDWEIKGLVEYVSGGPQPGGFFLAVPRGVHAVKLGNEASISQNVRVRPGFIYSLTFGATRTCAQDEVLRVSIPGQSADLPIQTLYSTDGGDTYAWAFNATTEVVNVTFHNPGIQEDRTCGPLLDAIAIKQMPPLKLTRGSLAKNGGYETGPHVFKNFSTGVLLLPKQQDLISPLPGWIIESLKPVKYIDSKHFSVPTGLAAIELIGGRESAIAQIIRTVPNKSYNLTFTIGDAKNGCHGSMTVEAFAAKETVKVPHASQGKGEFKAASLKFKALSARTRITFYSAYYHTKLHDFGHMCGPVLDDVRVYPVS

SEQ ID NO: 167 - DNA, 1107 bp, Vitis vinifera
atggcggttttgatctcactcttgcttgctctctcctctgtgttcttcactggacctgcttttgcaggcacatatttggaaggactcctcccaaatggcaactttgaagagtcacccaagccaactgacctcaagaaaacagtgatcaagggaaaatactcactacccaaatgggaaatcaatggctctgttgagtacattgccggtgggcctcagcctggcggaatgttctttgctgtggcacatggcgtccacgccgtgaggcttggcaatgaggcttccatttcacaaaccataccagtgaagccaggctctctatatgcactaacctttggggcatcaagaacttgtgcccaagatgaggtattgagagtctcagttcccccccaaacaggggacctccccctgcagacactctatgacagctttggaggtgatgtttatgcttggggattcagagccacttctaatgaggccaaggtgactttccacaatactggagtccaagaggatcctgcttgtggcccgctcttggatgcagttgctatcaaggagctcttccctccaatgccaaccagagataacttggtcaagaacagtggattcgaggaaggtcctcatctgttgatcaactcttccaatggtgtcctcctccctcccaaacaggaagatctcacatccccgctgcccggttggatcattgagtccctcaaagctgtgaagttcatagacaaaaagcacttcaacgtccccttcggccttgctgcagttgaactcctcgcaggaagagaaagcgccattgcccaggtccttcgaacagttcccaacaagctctacaatctcacattcagcataggagacgggaagaatggttgccatggagacatgatgatcgaagcatttgcagctaaagacagcttcaaagctcccttcaaatccagaggaaaaggagagttcaagactgtaagtttcaagttcaaagccattgcagccaggaccagactcacattcttcagctctttctaccacaccaggattgatgactttggatcgctctgtggccctgtcctcgatcaagttagggttttctcaatccgtaagccttaa

SEQ ID NO: 168 - protein, 368 aa, Vitis vinifera
MAVLISLLLALSSVFFTGPAFAGTYLEGLLPNGNFEESPKPTDLKKTVIKGKYSLPKWEINGSVEYIAGGPQPGGMFFAVAHGVHAVRLGNEASISQTIPVKPGSLYALTFGASRTCAQDEVLRVSVPPQTGDLPLQTLYDSFGGDVYAWGFRATSNEAKVTFHNTGVQEDPACGPLLDAVAIKELFPPMPTRDNLVKNSGFEEGPHLLINSSNGVLLPPKQEDLTSPLPGWIIESLKAVKFIDKKHFNVPFGLAAVELLAGRESAIAQVLRTVPNKLYNLTFSIGDGKNGCHGDMMIEAFAAKDSFKAPFKSRGKGEFKTVSFKFKAIAARTRLTFFSSFYHTRIDDFGSLCGPVLDQVRVFSIRKP

SEQ ID NO: 169 - DNA, 1155 bp, Zea mays
atgctgctgacgctgctgctggtcctctccgtctcgtcctcgacatcgacgtcggctgctgccaccctcgccgtcagcgctccgcccccactgcctgttcctcctcctcgtcatgctcaagacgccgaaggcatgctcatcaacggcaacttcgagacggcgccgcggaggctgaacaagaccctcatcgtggggcgccactcgctgccggggtggacggtgcaggggcacgtggagtacgtctcgggcggtccccagcccgggggcatgttcttcgcggtgccgcacggcgtgcacgcgctgcgcctcggcagccgcgcgtcggcgtcgcagaatgtgacggtgcggccgggggcgctgtacgcgctcacgttcgcggcgacgcggacgtgcgcgcaggacgaggccctgcgcgtggcggtggcgccgtcgctctcggcgcccgccgacgtcgccgtgcgcacgctctacagcggcgcgtccgccgacacctgggcctggggcttccgcgcctcctcccccgtcgcgcaggtcacgttcgccaaccccggcgtgcaggaggaccccgcgtgcggcccgctgctggacgctgtcgccatcaaggagctgcccgcgccgtacccgaccaaagacaacctgatcaagaacgacggcttcgagatcggtccccaggtgctcaggaactcgacggtcggcgttctgctgccccccaagcagaaggacgcgacgtcgccgctgcccggctggatcatcgagtcgctcaaggcggtgcggtttatcgacgcggcccacttctctgtccccgcggggcagtacgcggtggagctggtggccgggcgggagagcgccatcgcgcaggtcatccgcaccgtgcccaaccgcgcctacaacctgtcgttcgccgtcggcgacgcccggaacggctgccacggctctatgctggtggaggcgttcgcgggcaacgtcacgcagaaggtgccgttcgattccgcggggaaaggcgggttcaagacggcggcgttcaggttcgtggccggcggcgtccgcacccgcctcaccttctacagctcctactaccacaccaaggtcaccgacggcgtctcgctctgcggccccgtgctggaccaggtcaaggttgtgcctgtcaaggcgtag

SEQ ID NO: 170 - protein, 384 aa, Zea mays
MLLTLLLVLSVSSSTSTSAAATLAVSAPPPLPVPPPRHAQDAEGMLINGNFETAPRRLNKTLIVGRHSLPGWTVQGHVEYVSGGPQPGGMFFAVPHGVHALRLGSRASASQNVTVRPGALYALTFAATRTCAQDEALRVAVAPSLSAPADVAVRTLYSGASADTWAWGFRASSPVAQVTFANPGVQEDPACGPLLDAVAIKELPAPYPTKDNLIKNDGFEIGPQVLRNSTVGVLLPPKQKDATSPLPGWIIESLKAVRFIDAAHFSVPAGQYAVELVAGRESAIAQVIRTVPNRAYNLSFAVGDARNGCHGSMLVEAFAGNVTQKVPFDSAGKGGFKTAAFRFVAGGVRTRLTFYSSYYHTKVTDGVSLCGPVLDQVKVVPVKA

SEQ ID NO: 171 - DNA, 1194 bp, Zea mays
aagaagttatacatccatacttcccaagaccactggcaccgagagattcagatttcagaacaacaccatgccaacgacaccaacaatgccaagaaccagcccaatacttgccttcaacccagccgcggcgttcaatgcccatacccggacatcgtcaatcaccgggccacacagcgagctgtggtcgtcactcctcgtgttgtagtacacgctatagaacgccacacgtgttctctcagcgcgtgcagtgaacgtcacattcgcagcctggctggtggcgttgcccattggggagtagtggaagttctgggcctgatcccccgcgaatgccatgacggccattggtggttggcacgagtcccccgccgtgcccagtgtgaacgtcaggctgtaaaccttctgaggggtggtctcgaccatctgggagatgataccctccttgcctgacagaagctcaatggcacgcttcccctggggaaccttgtactgatcagagtctatgtagcggacagcgcggtttgactcgatcatccagccaggtatggcagatgtctgctcatcaaggttagttgggagcagcacgccaaagctggtgttcgggaacatccaagggccctcctcaaagtctccattcagcaccacgttatcctttggtttgtccggagtgaagagctttttgacagcaacgttgtctaggatgggaccacaagttggatcatcctccatgccagggttcatgaattgaagatgtgcctgctcttccgtcgcctgaaaagccaacgcgtacgcatcccagccttctatgttgtacaacgtctgcaagtctactgtctgagacacgccacctagcacggaaacattcagtgcctccagttgtgcacatgtccgggcagcactgaatgtgatagcatactccgaacccttctcaacgtccaccacctgcccaacgctagcatcattccctagccttactgcatggtccccctgtggaacaatcaggatcatgccaccctggtgttggcctgctgaaatgagttcaaccgtgccgttgatcgtccaaccagggattgacgatgcaccctcagcaacagacgcagattttacaaaaccaccagttggtgctgtctcaaagtcaccattgctgatcaggccatcctccaccggagccgccgaggccgggcggacgggcgccgc

SEQ ID NO: 172 - protein, 397 aa, Zea mays
MEADSARKRLALLALLLLAAPVRPASAAPVEDGLISNGDFETAPTGGFVKSASVAEGASSIPGWTINGTVELISAGQHQGGMILIVPQGDHAVRLGNDASVGQVVDVEKGSEYAITFSAARTCAQLEALNVSVLGGVSQTVDLQTLYNIEGWDAYALAFQATEEQAHLQFMNPGMEDDPTCGPILDNVAVKKLFTPDKPKDNVVLNGDFEEGPWMFPNTSFGVLLPTNLDEQTSAIPGWMIESNRAVRYIDSDQYKVPQGKRAIELLSGKEGIISQMVETTPQKVYSLTFTLGTAGDSCQPPMAVMAFAGDQAQNFHYSPMGNATSQAANVTFTARAERTRVAFYSVYYNTRSDDHSSLCGPVIDDVRVWALNAAAGLKASIGLVLGIVGVVGMVLF

SEQ ID NO: 173 - DNA, 1173 bp, Zea mays
atggagctcccgtggggaatgctgctgccgctgctgctggtcctctccgtctcgtccccgtcctcgtcgtcggctgctgccacgctcgccgtcaccgctccgcccccactgcctgttcctcctcctcgtcatgctcaagacgccgaaggcatgctcatcaacggcaacttcgagacggcgccgcggaggctgaacaagaccctcatcgtggggcgccactcgctgccggggtggacggtgcaggggcacgtggagtacgtctcgggcggtccccagcccgggggcatgttcttcgcggtgccgcacggcgtgcacgcgctgcgcctcggcagccgcgcgtcggcgtcgcagaacgtgacggtgcggccgggggcgctgtacgcgctcacgttcgcggcgacgcggacgtgcgcgcaggacgaggccctgcgcgtggcggtggcgccgtcgctctcggcgcccgccgacgtcgccgtgcgcacgctctacagcggcgcgtccgccgacacctgggcctggggcttccgcgcctcctcccccgtcgcgcaggtcacgttcgccaaccccggcgtgcaggaggaccccgcgtgcggcccgctgctggacgccgtcgccatcaaggagctgcccgcgccgtacccgaccaaagacaacctgatcaagaacgacggcttcgagatcggtccccaggtgctcaggaactcgacggtcggcgtgctgctgccccccaagcagaaggacgcgacgtcgccgctgcccggctggatcatcgagtcgctcaaggcggtgcggttcatcgacgcggctcacttctctgtccccgcggggcagtatgcggtggagctggtggccgggcgggagagcgccatcgcgcaggtcatccgcaccgttcccaaccgcgcctacaacctgtcgttcgccgtcggcgacgcccggaacggctgccacggctccatgctggtggaggcgttcgcgggcaacgtcacgcagaaggtgccgttcgattccgccgggaaaggcgggttcaagacggcggcgttcaggttcgtggccggcggcgtccgcacccgcctcaccttctacagctcctactaccacaccaaggtcaccgacggcgtctcgctctgcggccccgtgctggaccaggtcaaggttgtgcctgtcaaggcgtag

SEQ ID NO: 174 - protein, 390 aa, Zea mays
MELPWGMLLPLLLVLSVSSPSSSSAAATLAVTAPPPLPVPPPRHAQDAEGMLINGNFETAPRRLNKTLIVGRHSLPGWTVQGHVEYVSGGPQPGGMFFAVPHGVHALRLGSRASASQNVTVRPGALYALTFAATRTCAQDEALRVAVAPSLSAPADVAVRTLYSGASADTWAWGFRASSPVAQVTFANPGVQEDPACGPLLDAVAIKELPAPYPTKDNLIKNDGFEIGPQVLRNSTVGVLLPPKQKDATSPLPGWIIESLKAVRFIDAAHFSVPAGQYAVELVAGRESAIAQVIRTVPNRAYNLSFAVGDARNGCHGSMLVEAFAGNVTQKVPFDSAGKGGFKTAAFRFVAGGVRTRLTFYSSYYHTKVTDGVSLCGPVLDQVKVVPVKA

SEQ ID NO: 175 - DNA, 1194 bp, Zea mays
atggagccagattcggcgacgacgaggctcgcattgctggcgctgcttctcctggcggcgcccgcccgcccggcctcagcggctccggtggaggatggcctgctcagcaatggtgactttgagacggcaccagccggcggttttgtaagatctgcgtctgttgctgagggtgcatcgtcaatccctggttggacaatcaatggcacagtcgagctcatttcagcaggccagcaccagggtggcatgatcctgattgttccacagggagaccatgctgtaaggctagggaatgatgctagcgttgggcaggtggtggacgtcgagaagggctcggactacgctgtcacattcagcgctgcccggacatgtgcacaactggaggcactgaacgtctccgtgctaggtggcgtgtcgcagacagtagatttacagacgttgtacaacatagaagggtgggacgcgtacgcgctggcttttcaggcgacggaagagcaggcgcatcttcagttcatgaaccctggcatggaggacgatccaacttgtggccccatcctagacaacgttgctgtcaagaagctcttcactccggacaaaccaaaggataacgtggtgctgaatggagactttgaggagggcccttggatgttcccgaacaccagctttggcgtgctgctcccaactaaccttgatgagcagacatctgccatacctggctggatgatcgagtcaaaccgcgctgtccgctacatagactctgatcagtacaaggttccccaggggaagcgtgccattgagcttctgtcaggcaaggagggtatcatctcccagatggtcgagacgacccctgagaaggtttacagcctgacggccatgctgggcgcggcgggggactcgtgccaaccaccaatggccatcatggcgttcgccggggaccaggcccagaacttccattactcaccattgggcaacgccacgagccaggctgtgaacgtgacgttcactgcgcgcgctgagaggacacgcgtggcgttctacagcgtgtactacaacacgaggagtgacgaccacagctcgctgtgcgggccggtgatcgacgacgtccgcgtatggggcttgaacaccgcggctgggttgaaggcgagtgttggactggttcttggcattgttggcgtcgttggcatggtgctgttctga

SEQ ID NO: 176 - protein, 397 aa, Zea mays
MEPDSATTRLALLALLLLAAPARPASAAPVEDGLLSNGDFETAPAGGFVRSASVAEGASSIPGWTINGTVELISAGQHQGGMILIVPQGDHAVRLGNDASVGQVVDVEKGSDYAVTFSAARTCAQLEALNVSVLGGVSQTVDLQTLYNIEGWDAYALAFQATEEQAHLQFMNPGMEDDPTCGPILDNVAVKKLFTPDKPKDNVVLNGDFEEGPWMFPNTSFGVLLPTNLDEQTSAIPGWMIESNRAVRYIDSDQYKVPQGKRAIELLSGKEGIISQMVETTPEKVYSLTAMLGAAGDSCQPPMAIMAFAGDQAQNFHYSPLGNATSQAVNVTFTARAERTRVAFYSVYYNTRSDDHSSLCGPVIDDVRVWGLNTAAGLKASVGLVLGIVGVVGMVLF

SEQ ID NO: 177 - DNA, 1197 bp, Zingiber officinale
atgaataatccactcgctcgtcttccacatctcattgtcctcctcctcctcctcactcattgtgtttcagctgcagtggaagatggcttgattaacaacggggatttcgagactacgccagcgccctcgggcgggaccgctggcaatgacctgggcgaaggaattacctcccttcccggttggaccatcaatggcaccgtcgagctcgtggagtcaggccaaaagcaaggcggcatgattcttatcgttcctgaaggatcgcgtgcgctgcggctgggcaacgaggcgcagatatcgcagggtctacagctggagaaaggggcgtcgtacgcagtcacgtttagctccgcccggacatgcgcgcaactggagtcgcttaacgtgtcggtgtttccggcagcgtcgacggtagaccttcagacgctgtacagcgtcgaggggtgggacgcctacgcctgggctttccaggccgaggccgacgacggcaccgagtcactgctaagcttcaagaatcccggaatggaagacgatcccacttgcggccctatcatcgacaacattgccatcaagaagctcttcactcccgatagacccaaagacaacgccgtcgtgaacggggactttgaggaaggtccgtggatgttccaaaacgccagcctcggcgttcttcttcccaccaacctcgaggaggccatgtcggctctcccgggctggttggtggagtccaatcgtgcggtgcggtacattgactctaaccacttcgtcgttcctcaaggaaagcgcgccgtcgagcttctctcaggcaaggaaggcatcatctcgcagatggtggagacgactcccgacaagcagtacagcctcaccttcaccgtcggcgccgccggagactcctgccaagcgccgctagcggtcatggccttcgccagcgaccaggcgcagaacttccactacgcccccaccggcaacgccactagccagctggccaatatcaccttcacggcgcgcgccgaacgcacgcgcattgccttctacagcgtctactacaacactcggagcgatgaccacagctcgctctgcggccccgttgtggacgacgtcagggtttggggcgtctccagcacggtcactttgacgcgcgcttgcgccgcgtctcttctcagtctgctcgttactgtgctcatggtggtaacagcctga

SEQ ID NO: 178 - protein, 398 aa, Zingiber officinale
MNNPLARLPHLIVLLLLLTHCVSAAVEDGLINNGDFETTPAPSGGTAGNDLGEGITSLPGWTINGTVELVESGQKQGGMILIVPEGSRALRLGNEAQISQGLQLEKGASYAVTFSSARTCAQLESLNVSVFPAASTVDLQTLYSVEGWDAYAWAFQAEADDGTESLLSFKNPGMEDDPTCGPIIDNIAIKKLFTPDRPKDNAVVNGDFEEGPWMFQNASLGVLLPTNLEEAMSALPGWLVESNRAVRYIDSNHFVVPQGKRAVELLSGKEGIISQMVETTPDKQYSLTFTVGAAGDSCQAPLAVMAFASDQAQNFHYAPTGNATSQLANITFTARAERTRIAFYSVYYNTRSDDHSSLCGPVVDDVRVWGVSSTVTLTRACAASLLSLLVTVLMVVTA

SEQ ID NO: 179 - DNA, 1131 bp, Zea mays
atgattagtgatctcttggcttcttgcactacaggcctgctcagcaatggtgactttgagacagcaccaagtggtggttttgtaaaatctgcttctgttgctgagggtgcatcgtcaatccctggttggacgatcaacggcacggttgaactcatttcagcaggccaacaccagggtggcatgatcctgattgttccacagggggaccatgcagtaaggctagggaatgatgctagcgttgggcaggtggtggacgttgagaagggttcggagtatgctatcacattcagtgctgcccggacatgtgcacaactggaggcactgaatgtttccgtgctaggtggcgtgtctcagacagtagacttgcagacgttgtacaacatagaaggctgggatgcgtacgcgttggcttttcaggcgacggaagagcaggcacatcttcaattcatgaaccctggcatggaggatgatccaacttgtggtcctatcctagacaacgttgccgtcaagaagctcttcaccccagacaaaccaaaggataacgtggtgctgaatggagactttgaggagggtccatggatgttccccaacacgagcttcggcgtgctgctcccaactaaccttgacgagcaaacgtctgccatacctggttggatgatcgagtcaaaccgcgccgtccgctacatagactctgatgagtacaaggttccccagggaaagcgtgccattgagcttctgtcaggcaaggaaggtatcatctcccagatggttgagaccacccctcagaaggtttacagcctgacgttcacactgggcacggcgggggactcgtgccaaccaccaatggccgtcatggcattcgcgggggatcaggcccagaacttccactactccccaatgggcaacgccaccagccaggctgcgaatgtgacgttcactgcacgcgctgagagaacacgtgtggcgttctatagcgtgtattacaacacgaggagtgacgaccacagctcgctgtgtggcccggtgattgacgatgtccgggtatgggcattgaacgccgcggctgggttgaaggcaagtattgggctggttcttggcattgttggtgtcgttggcatggtgttgttctga

SEQ ID NO: 180 - protein, 376 aa, Zea mays
MISDLLASCTTGLLSNGDFETAPSGGFVKSASVAEGASSIPGWTINGTVELISAGQHQGGMILIVPQGDHAVRLGNDASVGQVVDVEKGSEYAITFSAARTCAQLEALNVSVLGGVSQTVDLQTLYNIEGWDAYALAFQATEEQAHLQFMNPGMEDDPTCGPILDNVAVKKLFTPDKPKDNVVLNGDFEEGPWMFPNTSFGVLLPTNLDEQTSAIPGWMIESNRAVRYIDSDEYKVPQGKRAIELLSGKEGIISQMVETTPQKVYSLTFTLGTAGDSCQPPMAVMAFAGDQAQNFHYSPMGNATSQAANVTFTARAERTRVAFYSVYYNTRSDDHSSLCGPVIDDVRVWALNAAAGLKASIGLVLGIVGVVGMVLF

SEQ ID NO: 181 - protein, 40 aa, Artificial sequence
  motif 1
  VARIANT (2)..(2): / replace = "Ala" / replace = "Met"
  VARIANT (3)..(3): / replace = "Leu"
  VARIANT (7)..(7): / replace = "Gly"
  VARIANT (13)..(13): / replace = "Tyr" / replace = "His"
  VARIANT (14)..(14): / replace = "Ile"
  VARIANT (15)..(15): / replace = "Leu" / replace = "Ile"
  VARIANT (17)..(17): / replace = "Gly"
  VARIANT (18)..(18): / replace = "Ser"
  VARIANT (19)..(19): / replace = "Thr" / replace = "Arg"
  VARIANT (20)..(20): / replace = "Leu"
  VARIANT (24)..(24): / replace = "Val" / replace = "Ile"
  VARIANT (26)..(26): / replace = "Thr" / replace = "Ser"
  VARIANT (27)..(27): / replace = "Lys" / replace = "Met"
  VARIANT (28)..(28): / replace = "Asp" / replace = "Val"
  VARIANT (29)..(29): / replace = "Asp" / replace = "Val"
  VARIANT (30)..(30): / replace = "Glu"
  VARIANT (31)..(31): / replace = "Asp"
  VARIANT (32)..(32): / replace = "His" / replace = "Tyr"
  VARIANT (34)..(34): / replace = "Ser"
  VARIANT (36)..(36): / replace = "Ser"
  VARIANT (37)..(37): / replace = "Pro"
  VARIANT (39)..(39): / replace = "Met" / replace = "Thr"
  VARIANT (40)..(40): / replace = "Val"
NLVKNGDFEEGPWMFPNTSWGVLLPPNLEDETSPLPGWII

SEQ ID NO: 182 - protein, 25 aa, Artificial sequence
  motif 2
  VARIANT (1)..(1): / replace = "Leu" / replace = "Ala"
  VARIANT (2)..(2): / replace = "Lys" / replace = "Ala" / replace = "Thr"
  VARIANT (3)..(3): / replace = "Pro" / replace = "Arg"
  VARIANT (5)..(5): / replace = "Ala" / replace = "Met"
  VARIANT (6)..(6): / replace = "Arg" / replace = "His"
  VARIANT (8)..(8): / replace = "Ala"
  VARIANT (9)..(9): / replace = "Ile" / replace = "Val"
  VARIANT (10)..(10): / replace = "Ile"
  VARIANT (12)..(12): / replace = "Gly"
  VARIANT (14)..(14): / replace = "Ser"
  VARIANT (20)..(20): / replace = "Leu" / replace = "Ala" / replace = "Ser"
  VARIANT (22)..(22): / replace = "Val" / replace = "Arg" / replace = "Leu"
  VARIANT (24)..(24): / replace = "Arg"
  VARIANT (25)..(25): / replace = "Ile"
VEKGSLYSLTFSAARTCAQDESLNV

SEQ ID NO: 183 - protein, 14 aa, Artificial sequence
  motif 3
  VARIANT (2)..(2): / replace = "Glu"
  VARIANT (3)..(3): / replace = "Thr"
  VARIANT (7)..(7): / replace = "Ile"
  VARIANT (8)..(8): / replace = "Leu"
  VARIANT (10)..(10): / replace = "Ser"
  VARIANT (11)..(11): / replace = "Ile" / replace = "Phe"
  VARIANT (14)..(14): / replace = "Arg"
DPACGPLIDAVAIK

SEQ ID NO: 184 - protein, 29 aa, Artificial sequence
  motif 4
  VARIANT (2)..(2): / replace = "Leu"
  VARIANT (3)..(3): / replace = "Val"
  VARIANT (4)..(4): / replace = "Arg"
  VARIANT (7)..(7): / replace = "Gly"
  VARIANT (14)..(14): / replace = "Phe"
  VARIANT (15)..(15): / replace = "Leu" / replace = "Ile"
  VARIANT (17)..(17): / replace = "Asn" / replace = "Asp"
  VARIANT (18)..(18): / replace = "Ala"
  VARIANT (19)..(19): / replace = "Pro" / replace = "Arg"
  VARIANT (24)..(24): / replace = "Ile"
  VARIANT (26)..(26): / replace = "Ser"
  VARIANT (27)..(27): / replace = "Asn"
  VARIANT (28)..(28): / replace = "Ile" / replace = "Val"
  VARIANT (29)..(29): / replace = "Val"
NMLKNGDFEEGPYIFPGTSWGVLVPPMDE

SEQ ID NO: 185 - protein, 29 aa, Artificial sequence
  motif 5
  VARIANT (2)..(2): / replace = "Ile"
  VARIANT (3)..(3): / replace = "Thr"
  VARIANT (4)..(4): / replace = "Ala" / replace = "Ile"
  VARIANT (5)..(5): / replace = "Ala" / replace = "Thr"
  VARIANT (6)..(6): / replace = "Gly"
  VARIANT (7)..(7): / replace = "Gln"
  VARIANT (8)..(8): / replace = "Trp"
  VARIANT (9)..(9): / replace = "Ala"
  VARIANT (10)..(10): / replace = "Glu"
  VARIANT (11)..(11): / replace = "Ile"
  VARIANT (13)..(13): / replace = "Met"
  VARIANT (16)..(16): / replace = "Ile" / replace = "Met"
  VARIANT (18)..(18): / replace = "Gly" / replace = "Ser"
  VARIANT (20)..(20): / replace = "Asn"
  VARIANT (26)..(26): / replace = "Ala"
  VARIANT (29)..(29): / replace = "Trp"
NVSVSPESGVLPIQTVYGSSGWDSYSWAF

SEQ ID NO: 186 - protein, 15 aa, Artificial sequence
  motif 6
  VARIANT (2)..(2): / replace = "Ala"
  VARIANT (3)..(3): / replace = "Leu"
  VARIANT (4)..(4): / replace = "Ile"
  VARIANT (14)..(14): / replace = "Ser"
YSITFSAARTCAQAE

SEQ ID NO: 187 - DNA, 3693 bp, Artificial sequence
  expression cassettte comprising SEQ ID NO: 1
aatccgaaaagtttctgcaccgttttcaccccctaactaacaatatagggaacgtgtgctaaatataaaatgagaccttatatatgtagcgctgataactagaactatgcaagaaaaactcatccacctactttagtggcaatcgggctaaataaaaaagagtcgctacactagtttcgttttccttagtaattaagtgggaaaatgaaatcattattgcttagaatatacgttcacatctctgtcatgaagttaaattattcgaggtagccataattgtcatcaaactcttcttgaataaaaaaatctttctagctgaactcaatgggtaaagagagagattttttttaaaaaaatagaatgaagatattctgaacgtattggcaaagatttaaacatataattatataattttatagtttgtgcattcgtcatatcgcacatcattaaggacatgtcttactccatcccaatttttatttagtaattaaagacaattgacttatttttattatttatcttttttcgattagatgcaaggtacttacgcacacactttgtgctcatgtgcatgtgtgagtgcacctcctcaatacacgttcaactagcaacacatctctaatatcactcgcctatttaatacatttaggtagcaatatctgaattcaagcactccaccatcaccagaccacttttaataatatctaaaatacaaaaaataattttacagaatagcatgaaaagtatgaaacgaactatttaggtttttcacatacaaaaaaaaaaagaattttgctcgtgcgcgagcgccaatctcccatattgggcacacaggcaacaacagagtggctgcccacagaacaacccacaaaaaacgatgatctaacggaggacagcaagtccgcaacaaccttttaacagcaggctttgcggccaggagagaggaggagaggcaaagaaaaccaagcatcctccttctcccatctataaattcctccccccttttcccctctctatataggaggcatccaagccaagaagagggagagcaccaaggacacgcgactagcagaagccgagcgaccgccttctcgatccatatcttccggtcgagttcttggtcgatctcttccctcctccacctcctcctcacagggtatgtgcctcccttcggttgttcttggatttattgttctaggttgtgtagtacgggcgttgatgttaggaaaggggatctgtatctgtgatgattcctgttcttggatttgggatagaggggttcttgatgttgcatgttatcggttcggtttgattagtagtatggttttcaatcgtctggagagctctatggaaatgaaatggtttagggatcggaatcttgcgattttgtgagtaccttttgtttgaggtaaaatcagagcaccggtgattttgcttggtgtaataaagtacggttgtttggtcctcgattctggtagtgatgcttctcgatttgacgaagctatcctttgtttattccctattgaacaaaaataatccaactttgaagacggtcccgttgatgagattgaatgattgattcttaagcctgtccaaaatttcgcagctggcttgtttagatacagtagtccccatcacgaaattcatggaaacagttataatcctcaggaacaggggattccctgttcttccgatttgctttagtcccagaattttttttcccaaatatcttaaaaagtcactttctggttcagttcaatgaattgattgctacaaataatgcttttatagcgttatcctagctgtagttcagttaataggtaatacccctatagtttagtcaggagaagaacttatccgatttctgatctccatttttaattatatgaaatgaactgtagcataagcagtattcatttggattattttttttattagctctcaccccttcattattctgagctgaaagtctggcatgaactgtcctcaattttgttttcaaattcacatcgattatctatgcattatcctcttgtatctacctgtagaagtttctttttggttattccttgactgcttgattacagaaagaaatttatgaagctgtaatcgggatagttatactgcttgttcttatgattcatttcctttgtgcagttcttggtgtagcttgccactttcaccagcaaagttcatttaaatcaactagggatatcacaagtttgtacaaaaaagcaggcttaaacaatgagaagaaaaacagagatgattcagactaccccctgcgtcgcgctgctcttgctcgtcggcgttgcttttgctgctcgatcggcgtcggctatcaccgatggcctgctgccgaatggcaacttcgaggaggcgccggacgagtcgcagatgaacggcacgagggtgacgggtcgctacgcgatacctcagtgggagatctccgggttcgtggagtacatcgggtcgggccagaagcagggagacatgctcctgccggtgccggagggcgcgtacgccgtgcggctgggcaacgaggcctccatccagcagcggcttaccctgacgcggggaatgcactactccatcatattcagcgcggcgcgcacctgcgcccagtccgagctcctcaacatcacgatcacccccgagtccggcgagatccccatccagacggtgtacaccagcagcggctgggactcctactcctgggccttcaaggccaagcacagcgtcgtgttgttcatcgtccacaaccccggtgtctctgatgacgaagcttgcggccccctcatcgactcgttcgccattaagaccctgaaccctcctcaaagaacgaaaggtaacatgctgaagaatgggggcttcgaggagggcccgtacatcttccccaacacgtcctggggcgtgcttgtgccgcccatggacgaggacgactactcgccgctgtccccgtggacgatcctgtcgaccaccaagtccgtcaagtacatcgacgcggcgcactacgctgtgccgggcggcgcccgcgcggttgagctggtgtccggcatggagacggcgatgctgcaggaggtgagcaccgtgcccgggcggtcgtacaggctggagttctccgtcggggacgccggcgacgggtgctccgggtccctgaccgtgcaggcgtacgcgtcgcgcgggagcgtgaaggtgacgtaccagtcgcagggcacgggcggctacaagcgcgggctgctcgagttcacggccacggagaagcggacgcgggtagtgttcgtcagcatggcctacaccacgaagtccgacggcacgctgtgtggtcccgtcatcgacgacgcgtcgctcgtcagtgtccacagccaccgccggttccttctgtaatattatacccagctttcttgtacaaagtggtgatatcacaagcccgggcggtcttctagggataacagggtaattatatccctctagatcacaagcccgggcggtcttctacgatgattgagtaataatgtgtcacgcatcaccatgggtggcagtgtcagtgtgagcaatgacctgaatgaacaattgaaatgaaaagaaaaaaagtactccatctgttccaaattaaaattggttttaaccttttaataggtttatacaataattgatatatgttttctgtatatgtctaatttgttatcatcc

SEQ ID NO: 188 - DNA, 3491 bp, Artificial sequence
  expression cassettte comprising SEQ ID NO: 3
aatccgaaaagtttctgcaccgttttcaccccctaactaacaatatagggaacgtgtgctaaatataaaatgagaccttatatatgtagcgctgataactagaactatgcaagaaaaactcatccacctactttagtggcaatcgggctaaataaaaaagagtcgctacactagtttcgttttccttagtaattaagtgggaaaatgaaatcattattgcttagaatatacgttcacatctctgtcatgaagttaaattattcgaggtagccataattgtcatcaaactcttcttgaataaaaaaatctttctagctgaactcaatgggtaaagagagagattttttttaaaaaaatagaatgaagatattctgaacgtattggcaaagatttaaacatataattatataattttatagtttgtgcattcgtcatatcgcacatcattaaggacatgtcttactccatcccaatttttatttagtaattaaagacaattgacttatttttattatttatcttttttcgattagatgcaaggtacttacgcacacactttgtgctcatgtgcatgtgtgagtgcacctcctcaatacacgttcaactagcaacacatctctaatatcactcgcctatttaatacatttaggtagcaatatctgaattcaagcactccaccatcaccagaccacttttaataatatctaaaatacaaaaaataattttacagaatagcatgaaaagtatgaaacgaactatttaggtttttcacatacaaaaaaaaaaagaattttgctcgtgcgcgagcgccaatctcccatattgggcacacaggcaacaacagagtggctgcccacagaacaacccacaaaaaacgatgatctaacggaggacagcaagtccgcaacaaccttttaacagcaggctttgcggccaggagagaggaggagaggcaaagaaaaccaagcatcctccttctcccatctataaattcctccccccttttcccctctctatataggaggcatccaagccaagaagagggagagcaccaaggacacgcgactagcagaagccgagcgaccgccttctcgatccatatcttccggtcgagttcttggtcgatctcttccctcctccacctcctcctcacagggtatgtgcctcccttcggttgttcttggatttattgttctaggttgtgtagtacgggcgttgatgttaggaaaggggatctgtatctgtgatgattcctgttcttggatttgggatagaggggttcttgatgttgcatgttatcggttcggtttgattagtagtatggttttcaatcgtctggagagctctatggaaatgaaatggtttagggatcggaatcttgcgattttgtgagtaccttttgtttgaggtaaaatcagagcaccggtgattttgcttggtgtaataaagtacggttgtttggtcctcgattctggtagtgatgcttctcgatttgacgaagctatcctttgtttattccctattgaacaaaaataatccaactttgaagacggtcccgttgatgagattgaatgattgattcttaagcctgtccaaaatttcgcagctggcttgtttagatacagtagtccccatcacgaaattcatggaaacagttataatcctcaggaacaggggattccctgttcttccgatttgctttagtcccagaattttttttcccaaatatcttaaaaagtcactttctggttcagttcaatgaattgattgctacaaataatgcttttatagcgttatcctagctgtagttcagttaataggtaatacccctatagtttagtcaggagaagaacttatccgatttctgatctccatttttaattatatgaaatgaactgtagcataagcagtattcatttggattattttttttattagctctcaccccttcattattctgagctgaaagtctggcatgaactgtcctcaattttgttttcaaattcacatcgattatctatgcattatcctcttgtatctacctgtagaagtttctttttggttattccttgactgcttgattacagaaagaaatttatgaagctgtaatcgggatagttatactgcttgttcttatgattcatttcctttgtgcagttcttggtgtagcttgccactttcaccagcaaagttcatttaaatcaactagggatatcacaagtttgtacaaaaaagcaggcttaaacaatggtgctggtggtccccgaggggagccacgcggtgcggctcgggaacgaggcgtcgatccggcagcggctcgccggcgcggcgcgcggcgcgcggtacgcgctcacgttcagcgcggcgcggacgtgcgcgcaggcggagcggctgaacgtgtcggcgtcggggcagtgggcggtgctccccatgcagaccatgtacagcagcaacggctgggactcgtacgcctgggcctgggatgccgccgccgacgcgttcgacgtcgtcatccacaaccccggcgtcaccgaggaccccgcctgcggccccctcatcgactccgtcgccatccgcaccctcaaccctcctcgccgcaccaacaagaacctggtgaagaacggggacttcgaggagggcccgtacatcatcccggggactaggtggggggtgctgatcccgtccatggtggtggacgagcactcgccgctgccggggtggatggtggagtcgctcaaggcggtgaagtacatcgacagcgaccacttcgcggtgccgcgcgggcggcgcgctgtcgagctgctggcggggcgggagagcgcgatcgcgcaggtgatccgcaccgtccccgggaggcagtacgcgctgtcgttcaccgtcggcgacgccagcaacggctgcgaggggtcgctggtggtggaggcgtacgccgggagggagtccaccagggtggcgcacgagtcggctggccgcggcggcgccgccaagcgcgccgtgctgccgttccgcgccgccgcggcgcgcacccgcgtcgtgttcttcagctcgttctacagcaccaggagcgacgacatgagctcgctctgcgggccggtgatcgacgacgtcgccgtcgtcagcgtgcgcgcgcggcggccggcggcgaagcgcggctagggtctagctagcgccattgccgcgatgtcgtactaacccagctttcttgtacaaagtggtgatatcacaagcccgggcggtcttctagggataacagggtaattatatccctctagatcacaagcccgggcggtcttctacgatgattgagtaataatgtgtcacgcatcaccatgggtggcagtgtcagtgtgagcaatgacctgaatgaacaattgaaatgaaaagaaaaaaagtactccatctgttccaaattaaaattggttttaaccttttaataggtttatacaataattgatatatgttttctgtatatgtctaatttgttatcatcc

SEQ ID NO: 189 - DNA, 2194 bp, Oryza sativa
aatccgaaaagtttctgcaccgttttcaccccctaactaacaatatagggaacgtgtgctaaatataaaatgagaccttatatatgtagcgctgataactagaactatgcaagaaaaactcatccacctactttagtggcaatcgggctaaataaaaaagagtcgctacactagtttcgttttccttagtaattaagtgggaaaatgaaatcattattgcttagaatatacgttcacatctctgtcatgaagttaaattattcgaggtagccataattgtcatcaaactcttcttgaataaaaaaatctttctagctgaactcaatgggtaaagagagagattttttttaaaaaaatagaatgaagatattctgaacgtattggcaaagatttaaacatataattatataattttatagtttgtgcattcgtcatatcgcacatcattaaggacatgtcttactccatcccaatttttatttagtaattaaagacaattgacttatttttattatttatcttttttcgattagatgcaaggtacttacgcacacactttgtgctcatgtgcatgtgtgagtgcacctcctcaatacacgttcaactagcaacacatctctaatatcactcgcctatttaatacatttaggtagcaatatctgaattcaagcactccaccatcaccagaccacttttaataatatctaaaatacaaaaaataattttacagaatagcatgaaaagtatgaaacgaactatttaggtttttcacatacaaaaaaaaaaagaattttgctcgtgcgcgagcgccaatctcccatattgggcacacaggcaacaacagagtggctgcccacagaacaacccacaaaaaacgatgatctaacggaggacagcaagtccgcaacaaccttttaacagcaggctttgcggccaggagagaggaggagaggcaaagaaaaccaagcatcctccttctcccatctataaattcctccccccttttcccctctctatataggaggcatccaagccaagaagagggagagcaccaaggacacgcgactagcagaagccgagcgaccgccttctcgatccatatcttccggtcgagttcttggtcgatctcttccctcctccacctcctcctcacagggtatgtgcctcccttcggttgttcttggatttattgttctaggttgtgtagtacgggcgttgatgttaggaaaggggatctgtatctgtgatgattcctgttcttggatttgggatagaggggttcttgatgttgcatgttatcggttcggtttgattagtagtatggttttcaatcgtctggagagctctatggaaatgaaatggtttagggatcggaatcttgcgattttgtgagtaccttttgtttgaggtaaaatcagagcaccggtgattttgcttggtgtaataaagtacggttgtttggtcctcgattctggtagtgatgcttctcgatttgacgaagctatcctttgtttattccctattgaacaaaaataatccaactttgaagacggtcccgttgatgagattgaatgattgattcttaagcctgtccaaaatttcgcagctggcttgtttagatacagtagtccccatcacgaaattcatggaaacagttataatcctcaggaacaggggattccctgttcttccgatttgctttagtcccagaattttttttcccaaatatcttaaaaagtcactttctggttcagttcaatgaattgattgctacaaataatgcttttatagcgttatcctagctgtagttcagttaataggtaatacccctatagtttagtcaggagaagaacttatccgatttctgatctccatttttaattatatgaaatgaactgtagcataagcagtattcatttggattattttttttattagctctcaccccttcattattctgagctgaaagtctggcatgaactgtcctcaattttgttttcaaattcacatcgattatctatgcattatcctcttgtatctacctgtagaagtttctttttggttattccttgactgcttgattacagaaagaaatttatgaagctgtaatcgggatagttatactgcttgttcttatgattcatttcctttgtgcagttcttggtgtagcttgccactttcaccagcaaagttc

SEQ ID NO: 190 - DNA, 56 bp, Artificial sequence
  primer: prm16414
ggggacaagtttgtacaaaaaagcaggcttaaacaatgagaagaaaaacagagatg

SEQ ID NO: 191 - DNA, 50 bp, Artificial sequence
  primer: prm16415
ggggaccactttgtacaagaaagctgggtataatattacagaaggaaccg

SEQ ID NO: 192 - DNA, 52 bp, Artificial sequence
  primer: prm16412
ggggacaagtttgtacaaaaaagcaggcttaaacaatggtgctggtggtccc

SEQ ID NO: 193 - DNA, 47 bp, Artificial sequence
  primer: prm16413
ggggaccactttgtacaagaaagctgggttagtacgacatcgcggca

SEQ ID NO: 194 - protein, 9 aa, Artificial sequence
  signature sequence
FSAARTCAQ

SEQ ID NO: 195 - DNA, 56 bp, Artificial sequence
  primer: prm13182
ggggacaagtttgtacaaaaaagcaggcttaaacaatgtttcaaagctcaacaaga

SEQ ID NO: 196 - DNA, 49 bp, Artificial sequence
  primer: prm13183
ggggaccactttgtacaagaaagctgggtctctttctccccattcaaac

SEQ ID NO: 197 - DNA, 1377 bp, Populus trichocarpa
atgcaagaaaactccaaagatgctcgaaacggcggcgactcgttgtcgacaacgccaacgcaggtctccaaaaaaccacgcgtcagcttctccataacagaacacgaaatccaccatgaattctctcaccacaaccctaatgtagcccgaattaacaacggtagcttcggtagctgccccggatccgtacttgctgctcaaaagaactggcagctccagttccttcaacaacctgacgacttctacttcaacactctccgtaaaggaattctccactcacgtactgtcatcaaagacctcatcaatgctgacgacgtcgacgagatctcccttgtcgataacgccaccactgccgccgccatcgtccttcaacaaattggccgtgccttcgctgaaggtaattttgctaaaaacgataccgttttaatgctccactgtgcttatcaagctgttaaaaaatcgattcaagcttacgtcacgcgtgctgggggttctgttatcgagattcagttaccgtttccggttacttcgaatgaggagataatttcggagtttaagagaggaatagagaaaggcaaagctaacggtaaaaaaattaggttagcgataattgatcatataacgtcgatgccgtgtgttgttattccggtaaaagagttggttaaaatttgcagagaagaaggtgtggatcaggtttttgttgatgcagctcatgctattggtagtgttgaaataaatgttaaagaaatcggggctgatttttatgtcagtaatttgcataagtggttcttttgccccccatcggttgcttttctgtattgtaagaaagcagcgagtttggaatttgatgtacaccatccggttgtttcacatgagtatggaaatggattgccgatagagagtgcgtggattgggactagggattatagctcacaattagtggtgccggcagctttggagtttgttaatcgatttgaggatgggattcaggggataatgaagaggaaccatgaggaggttgttaagatggggaaaatgctggccgaatcatgggggacaaatcttggttcttcaccggagatgtgtgcgggaatgatcatggttggtctgccttcgagattgcgtgtttcaagtgaagatgatgctttgaggttaagatcgcatttgcgtgagtgtcatggggttgaggttccgatacattatcagggtttaaaagatggtgaggagggagtgaaagataaggatggggttataacagcgtatgctaggatttctcatcaggtttataataagtctgaggattattgcaagcttagggatgctgtaaatcgtctttctgagaatctactgattcgcaaaacgttttatccagagtga

SEQ ID NO: 198 - protein, 458 aa, Populus trichocarpa
MQENSKDARNGGDSLSTTPTQVSKKPRVSFSITEHEIHHEFSHHNPNVARINNGSFGSCPGSVLAAQKNWQLQFLQQPDDFYFNTLRKGILHSRTVIKDLINADDVDEISLVDNATTAAAIVLQQIGRAFAEGNFAKNDTVLMLHCAYQAVKKSIQAYVTRAGGSVIEIQLPFPVTSNEEIISEFKRGIEKGKANGKKIRLAIIDHITSMPCVVIPVKELVKICREEGVDQVFVDAAHAIGSVEINVKEIGADFYVSNLHKWFFCPPSVAFLYCKKAASLEFDVHHPVVSHEYGNGLPIESAWIGTRDYSSQLVVPAALEFVNRFEDGIQGIMKRNHEEVVKMGKMLAESWGTNLGSSPEMCAGMIMVGLPSRLRVSSEDDALRLRSHLRECHGVEVPIHYQGLKDGEEGVKDKDGVITAYARISHQVYNKSEDYCKLRDAVNRLSENLLIRKTFYPE

SEQ ID NO: 199 - DNA, 1377 bp, Zea mays
atgcggtacagtaaaaacgtgtttcattacagactagagtctacaagaacgagtagtcagcagataacatgctacagcagttcatactttcatcaagaaattgaagtgagtgaacaaaggtaaagacattgtaattaagcgtaataacagtttcagttagaaataaccttctcagaaggtctcagcttggtgcaggagaaaccatcaagaacaagcttgcctacggcatctctcaagacctcatactcctccgtgacattgtaaacctgatgtgagattctcacgtaccctgtcacttgatcgcccttggccatctcttgtccttcctcaacacttcttgagttgttgaatattggcacctcgaccttgaattggttcctcagcatgtccctcactctcatcgcatcatcatcgctctcaatgccaaggcaacctggcagcccgaccatagccatgcttccgcacatttccggcggcgagccaagaaacgtcccccaagcctcggcgagcatcgtgcccatctcgatcaccttctcatggttccgtttgcttatcgcctcgatgccgccctcgaaccgtctcatgaagtcaacggcatcaggcacaacgagctgggcactgtaatcccgcacgccgatccaggcgctctccatgggtagcccgttgccgtactcgctagacacgacggggtggtggagctgcgaggctacggggtcatccttgcggatgtgcaggaaggccacggcggaagggcagaagaaccacttgtggaggttgctggtgtagaagtcggcgccgatgtcgcgcacgtcgatgggcacctggccgatggcgtgcgccccgtcgacgaagaccttgtccacgccctcctcgcggcagatggcgacgagctccttcacggggaggaggacgctgggcatcgaggtgatgtggtcgatgacggcgaggcggactctgcggcccccagcctgggcgagcgcgagcgcggcacggaactcggcgacgacggcgaccgccgaggcgacggggaacgggagcggcacctcgacgacggtggcccccgcgcggaccacgtacgcgtggatggacttcttgacggagctgtaggtgtagtggagcatgagcaccacgtcgccgcgtgcgaaggcgccctccgcgaagctccaggccacgtgctgcatgatgatggccgcggccgtggtagcgttgtcgacgagggagacctcggaggcgtcacccgccccgacggcggacgccacggcggcacgcgagcgggcgagccccggctggagagagtcgaagtagaacgcgtcgggctgagagagaaaaagccgttgccaccgcgccctcgccgcgaggaccgacgccgggcagcag

SEQ ID NO: 200 - protein, 458 aa, Zea mays
MASAPHDDAAKGRNAAPPEKRTSATITEADIRAEFAHHDGTVARVNNGTFGCCPASVLAARARWQRLFLSQPDAFYFDSLQPGLARSRAAVASAVGAGDASEVSLVDNATTAAAIIMQHVAWSFAEGAFARGDVVLMLHYTYSSVKKSIHAYVVRAGATVVEVPLPFPVASAVAVVAEFRAALALAQAGGRRVRLAVIDHITSMPSVLLPVKELVAICREEGVDKVFVDGAHAIGQVPIDVRDIGADFYTSNLHKWFFCPSAVAFLHIRKDDPVASQLHHPVVSSEYGNGLPMESAWIGVRDYSAQLVVPDAVDFMRRFEGGIEAISKRNHEKVIEMGTMLAEAWGTFLGSPPEMCGSMAMVGLPGCLGIESDDDAMRVRDMLRNQFKVEVPIFNNSRSVEEGQEMAKGDQVTGYVRISHQVYNVTEEYEVLRDAVGKLVLDGFSCTKLRPSEKVISN

SEQ ID NO: 201 - DNA, 1365 bp, Arabidopsis lyrata
atggagtcgggcgagcggcgcaatggcgattcgatgagtcacaatcaccgcgctccgaagaagccacgcctcgctgggttattaaccgagtcagatatcgactccgagttcgctcaccaccagaccggtgttgccaggatcaacaacggtagcttcgggtgctgtcccggctccgttctcgaggcgcagcgtgagtggcagcttcgttatcttcgtcagcctgatgagttctacttcaacggtctccgtcgtggacttgtcgcttctcgaactgtgatcagtgacctaatcaacgccgatgatgttgacgaggtctcgctcgttgataacgccaccactgctgcagctattgttcttcagaaagttggaaggtgtttctcggaagggaagtataagaaggaagatacggttgtgatgtttcactgtgcgtttcagagtgtgaagaagtcgattcaggcttatgtctctcgtgtgggaggttttactgttgaggttaggttacctttccctgttaattcgaacgaagagattatctccaagtttagagaaggattagagaaaggtagagcgaatggtagaacggttaggttagctatcattgaccatataacgtcgatgccgtgtgttttgatgccggtacgagaattggttaaaatctgcagagaagaaggtgtggagcaggtttttgttgatgcagctcatgccattggtagtgttaaagttgatgttaaagaaatcggagctgattactatgtgagtaatctgcataaatggttattttgtccgccgtctatcgcgtttttctattgtaagaaacgtggttctgagtctgatgttcatcaccctgtggtgtctcatgagtttggaaatggtttgcctatagaaagtgcctggattgggactagggattacagttcgcagcttgtggttccatcggtaatggagtttgtaaacaggttcgagggagggatcgaagggattatgattaggaaccatgatgaagctgttagaatggggttaatgctggctgatgcttggggaacgaatctcgggtcacctcctgaaatgtgtgttgggatggttatgatcggtttaccttcaaaactttgtgttgaaagtgatgaagatgctactaagttgcggtcatatctgcgggtgcattactcagtcgaggttccagtttattttctcggattgagggatggagaggaaggagtgaaagacaaagacagtggactaattactgcctatgttcggatctctcatcagatttataacaaaactgaggattatgagagattgagagacgcaataacagagttagtcaaggatcaaatgacttgtcaaaaccttccttcagggtag

SEQ ID NO: 202 - protein, 454 aa, Arabidopsis lyrata
MESGERRNGDSMSHNHRAPKKPRLAGLLTESDIDSEFAHHQTGVARINNGSFGCCPGSVLEAQREWQLRYLRQPDEFYFNGLRRGLVASRTVISDLINADDVDEVSLVDNATTAAAIVLQKVGRCFSEGKYKKEDTVVMFHCAFQSVKKSIQAYVSRVGGFTVEVRLPFPVNSNEEIISKFREGLEKGRANGRTVRLAIIDHITSMPCVLMPVRELVKICREEGVEQVFVDAAHAIGSVKVDVKEIGADYYVSNLHKWLFCPPSIAFFYCKKRGSESDVHHPVVSHEFGNGLPIESAWIGTRDYSSQLVVPSVMEFVNRFEGGIEGIMIRNHDEAVRMGLMLADAWGTNLGSPPEMCVGMVMIGLPSKLCVESDEDATKLRSYLRVHYSVEVPVYFLGLRDGEEGVKDKDSGLITAYVRISHQIYNKTEDYERLRDAITELVKDQMTCQNLPSG

SEQ ID NO: 203 - DNA, 1413 bp, Arabidopsis lyrata
atggcgtcgtctctatctccaccggaaaaagcttcgtatcaccaccgtcactcctccaaaagatactccaccaacggaaacgtcgaatcatcatcggtttccgatttcgtcaaacgaccgaaaatctctcctcagaattacatatcttgttccgagatcgagtcagagttttctcatcatgatccagaatttgctagaatcaacaacggtagctttggttgttgtccatcatcaatcctcgctttacaacgagattggcaactccggttccttcgtcaaccggatcgattctatttcgacgaactcaaaccgaaaatctccgattctagatctgtaatcaaacggttaatcaacgccgatcacgacgatgaagtctcaatcgttgataacgccacaactgcagctgcaatcgttcttcaacaaaccgcttgggcttttcgtgaaggaaggttcgataaaggcgacgcggtggttatgcttcattacgcttatggctctgtgaagaaatctgttgaagcgtatgttacacgctccggtggacacgtcatcgaggtacagttaccttttccagttaactcggcggatgaaattattgaccggtttaggattggtttagaatcgggtaaagcgaatggtaggagagttaggttagctttgattgatcatgtgacttctatgccaagtgttgtgattcctattaaagagcttgtgaagatttgtagaagagaaggtgttgaccaagtttttgttgatgctgctcatgggattggttgtgttgatgttgatatgaaggagattggtgctgatttctatacgagtaatcttcataagtggtttttcgcaccgccttctgttgctttcttgtattgtaggaaatcgagtaatggtggtggtggtgttgcggatttgcatcatcctgttgtgtcgaatgagtatgggaacggtttggcggttgagagttcttgggttggaactagagattatagtgctcagttggtggttccttcgattttggagtttgtgaatcggtttgaaggtgggattgatggtattaagaagaggaatcatgaatctgtggttgagatgggtcatatgttggttaagtcttgggggactcagctcggttgtccgcctgagatgtgtgcgagtatgatcatggtcgggttgccggtgtatttaggagtgtcgagtgattcagatgttttgaagcttagaacgtttttgagagaaaagttcagaattgaaatcccgatctactttaggccacctgaggacggagagattgatccaatcacgggatatgtgcgtatttctttccaagtttacaacaaacctgaggattatcataggcttagggacgcaataaacgaacttgtgagagatgggttcagatgcgcatctctatctagttga

SEQ ID NO: 204 - protein, 470 aa, Arabidopsis lyrata
MASSLSPPEKASYHHRHSSKRYSTNGNVESSSVSDFVKRPKISPQNYISCSEIESEFSHHDPEFARINNGSFGCCPSSILALQRDWQLRFLRQPDRFYFDELKPKISDSRSVIKRLINADHDDEVSIVDNATTAAAIVLQQTAWAFREGRFDKGDAVVMLHYAYGSVKKSVEAYVTRSGGHVIEVQLPFPVNSADEIIDRFRIGLESGKANGRRVRLALIDHVTSMPSVVIPIKELVKICRREGVDQVFVDAAHGIGCVDVDMKEIGADFYTSNLHKWFFAPPSVAFLYCRKSSNGGGGVADLHHPVVSNEYGNGLAVESSWVGTRDYSAQLVVPSILEFVNRFEGGIDGIKKRNHESVVEMGHMLVKSWGTQLGCPPEMCASMIMVGLPVYLGVSSDSDVLKLRTFLREKFRIEIPIYFRPPEDGEIDPITGYVRISFQVYNKPEDYHRLRDAINELVRDGFRCASLSS

SEQ ID NO: 205 - DNA, 1365 bp, Arabidopsis thaliana
atggaggcgggagagcggcgcaatggcgattcgatgagtcacaatcaccgcgcaccgaagaagccacgtctcgctgggttattaaccgagtcagatatcgactctgagttcgctcaccaccagaccggtgttgccagaatcaacaacggtagcttcgggtgctgtcctggctccgttctcgaggcgcaacgcgagtggcagcttcgttatctccgtcagcctgatgagttctacttcaacggtctccgtcgtggacttctcgcttctcgaactgtgatcagtgacctaatcaacgccgatgatgttgatgaggtctctctcgttgataacgccaccactgctgctgctattgttcttcagaaagttggaaggtgtttctcggaagggaagtataagaaggaagatactgtagtgatgtttcactgtgcgtttcagagtgtgaagaagtcgattcaggcttatgtctctcgtgtgggaggttctactgttgaggttaggttacctttccctgtaaattcgaacgaagagattatctccaagtttagagaaggactagagaaaggtagagcgaatggtagaacggttaggttagctatcattgatcatataacgtcgatgccgtgtgttttgatgccggtacgagaattggttaagatctgcagagaggaaggtgtggagcaggtttttgttgatgcagctcatgccattggtagtgttaaagttgatgtgaaagaaatcggagctgattactatgtgagtaatctgcataaatggttcttttgtccaccgtctatcgcgtttttctattgtaagaaacgtggttctgagtctgatgttcatcaccctgtggtgtctcatgagtttggaaatggtttgcctatagaaagtgcctggattgggactagggattacagttcacagcttgtggttccatctgtgatggagtttgtaaacaggttcgagggagggatggaagggataatgatgaagaaccatgatgaagctgttagaatgggtttaatgctggctgatgcttggggaacgaatctagggtcacctccagaaatgtgtgttgggatggttatgatcggtttaccttcaaaactctgtgttggaagtgatgaagatgctattaagttgcggtcatatctgcgggttcattactcagttgaggttccagttttttatctcggattgagggatggagaggaaggagtgaaagacaaagacagtggactaattactgcgtatgttcggatctctcatcaggtctataacaaaactgaggattatgagagattgagagacgcaataacagagttagtcaaggatcagatgacttgtcaaaaccttcctgcattgtag

SEQ ID NO: 206 - protein, 454 aa, Arabidopsis thaliana
MEAGERRNGDSMSHNHRAPKKPRLAGLLTESDIDSEFAHHQTGVARINNGSFGCCPGSVLEAQREWQLRYLRQPDEFYFNGLRRGLLASRTVISDLINADDVDEVSLVDNATTAAAIVLQKVGRCFSEGKYKKEDTVVMFHCAFQSVKKSIQAYVSRVGGSTVEVRLPFPVNSNEEIISKFREGLEKGRANGRTVRLAIIDHITSMPCVLMPVRELVKICREEGVEQVFVDAAHAIGSVKVDVKEIGADYYVSNLHKWFFCPPSIAFFYCKKRGSESDVHHPVVSHEFGNGLPIESAWIGTRDYSSQLVVPSVMEFVNRFEGGMEGIMMKNHDEAVRMGLMLADAWGTNLGSPPEMCVGMVMIGLPSKLCVGSDEDAIKLRSYLRVHYSVEVPVFYLGLRDGEEGVKDKDSGLITAYVRISHQVYNKTEDYERLRDAITELVKDQMTCQNLPAL

SEQ ID NO: 207 - DNA, 1428 bp, Arabidopsis thaliana
atggcgtcgtctctatctccaccggaagaagcttcgtatcaccaccgtcataccaaaaggtacacctcctccgcttcctccgcttcctccaccaccaacggaaccgtcgaatcatcggtttccgatttcgtcaaacgtcccaaaatctctcatccgaattacatatcaagttccgagatcgaatcagagttttctcatcacgatccagatttcgcaagaatcaacaacggtagttttggttgttgtccgtcatcaatcctagctttacaacgagattggcagctccggttccttcgtcaaccggatcgattctatttcgacgaactcaaaccaaaaatctccgattctagatctgtaatcaaacggttaataaacgccgagcatgacgatgaagtctcgatcgtcgataacgcaacaaccgcagctgcaatcgttcttcaacaaaccgcttgggcttttcgtgaaggtcggttcgataaaggcgacgcggtggttatgcttcattacgcttatggctctgtgaagaaatctgttgaagcgtatgttacacgctccggtggacacgtcaccgaggtacagttaccttttccggttatttcggcggatgagattattgaccggtttaggattggtttagagtctggtaaagcgaatggtaggagagttaggttagctttgattgatcatgtgacttctatgccaagtgttgtgattcctattaaagagcttgtgaagatttgtagaagagaaggtgttgaccaagtttttgttgatgctgctcatgggataggttgtgttgatgttgatatgaaggagattggtgctgatttctatactagtaatcttcataagtggtttttcgcaccgccttctgttgctttcttgtattgtaggaaatcgagtaatggtggtgttgcggatttgcatcatcccgttgtttcgaatgagtatgggaacggtttggcggttgagagttcgtgggttggaactagagattatagtgctcagttggtggttccttcgatattggagtttgtaaatcggtttgaaggcgggattgatggtattaagaagaggaatcatgagtctgttgttgagatgggtcaaatgttggttaagtcttgggggactcagctcggttgtccccctgagatgtgtgcgagtatgatcatggttgggttgccagtgtgtttaggagtgtcgagtgagtcggatgttttgaagcttagaacgtttttaagagaaaagttcagaattgaaatcccaatctactttaggccaccaggggatggagagattgatccgatcacgggatatgtgcgtatttcttttcaagtttacaacaaacctgaggattatcataggctcagggacgcaataaacgggcttgttagagatgggttcaaatgcacgtctctatcttgttga

SEQ ID NO: 208 - protein, 475 aa, Arabidopsis thaliana
MASSLSPPEEASYHHRHTKRYTSSASSASSTTNGTVESSVSDFVKRPKISHPNYISSSEIESEFSHHDPDFARINNGSFGCCPSSILALQRDWQLRFLRQPDRFYFDELKPKISDSRSVIKRLINAEHDDEVSIVDNATTAAAIVLQQTAWAFREGRFDKGDAVVMLHYAYGSVKKSVEAYVTRSGGHVTEVQLPFPVISADEIIDRFRIGLESGKANGRRVRLALIDHVTSMPSVVIPIKELVKICRREGVDQVFVDAAHGIGCVDVDMKEIGADFYTSNLHKWFFAPPSVAFLYCRKSSNGGVADLHHPVVSNEYGNGLAVESSWVGTRDYSAQLVVPSILEFVNRFEGGIDGIKKRNHESVVEMGQMLVKSWGTQLGCPPEMCASMIMVGLPVCLGVSSESDVLKLRTFLREKFRIEIPIYFRPPGDGEIDPITGYVRISFQVYNKPEDYHRLRDAINGLVRDGFKCTSLSC

SEQ ID NO: 209 - DNA, 1335 bp, Aquilegia sp.
atgaaccaccacaacaacaacaacaataacaacaaccatgtttccaagaaattgaaactatcaacaattacgaattcagaaattcgccaagaattcgaacaccatgataaaaagaccgcgcgaattaacaacggaagttttggaagttgtccagcaacaatattagcagcacagaaacaatggcaattaaagtttcttcaacaaccagatgatttctatttcaatcaacttcgaaaagggattaatgaatcaagaaatttaattaaagatttaattaatgctgaacatgttgatgaagtttctattgttgataatgcaactactgctgctgcaattgttcttcaacaaattggttgggcttttactgaaggtagatttcaaaaaggtgatgctgctgtaatgttacattatgcttatggtgctgtcaagaaatcaattcaagcttatgttagtcgtgctggtggatttgtaattgaggtacaattaccatttcctgttaactctaatgaagagattatatgtgaatttaagaaagcattacaacaagggaaattgaatggtagaaaagttagattagctgtaattgatcatattacttcaatgccaagtgttgttattcctattaaggagttggttcagatttgtagaaaagaaggtgttgatcaggtttttgttgatgctgctcatgctattgggaatgttgatattgatgttaaggatattggggctgatttttatactagtaatttgcataaatggtttttttgtccaccagcggttgcgtttttgtattgcaagaaatcggataaactgtccgatttacatcatccagtggtttctaatgagtatgggaatggcttggctattgagagtgcttggattggtactagggattatagttcccaattagttgttccatctgtgttggaatttgttaacaggtttgaaggtggtattcaaggaattaagaaaaggaatcatgatgctgctattgagatggggaaaatgttagctaaggcctggggaacaaatcttggttcacctccagagttgtgttgtagcatggtcatggttgggttgccttctagtttggagatttcaagtgaagcagatggtatgttgttcagaactcatttgcgtgagtcttttgggattgaagttccaatatattacaaggacccaaaaagtggtaatattgaagatggagttacaacagggtatgtcaggatctctcaccaaatttacaacacaattgatgactacaacagattacgggatgccattaaccagctcatccaggatgggtttacttgcaagagccttctctctcgctga

SEQ ID NO: 210 - protein, 444 aa, Aquilegia sp.
MNHHNNNNNNNNHVSKKLKLSTITNSEIRQEFEHHDKKTARINNGSFGSCPATILAAQKQWQLKFLQQPDDFYFNQLRKGINESRNLIKDLINAEHVDEVSIVDNATTAAAIVLQQIGWAFTEGRFQKGDAAVMLHYAYGAVKKSIQAYVSRAGGFVIEVQLPFPVNSNEEIICEFKKALQQGKLNGRKVRLAVIDHITSMPSVVIPIKELVQICRKEGVDQVFVDAAHAIGNVDIDVKDIGADFYTSNLHKWFFCPPAVAFLYCKKSDKLSDLHHPVVSNEYGNGLAIESAWIGTRDYSSQLVVPSVLEFVNRFEGGIQGIKKRNHDAAIEMGKMLAKAWGTNLGSPPELCCSMVMVGLPSSLEISSEADGMLFRTHLRESFGIEVPIYYKDPKSGNIEDGVTTGYVRISHQIYNTIDDYNRLRDAINQLIQDGFTCKSLLSR

SEQ ID NO: 211 - DNA, 1329 bp, Brassica napus
atggcgtctctctctccgccggaagaagaagccgccgccgccgccgcttcctttcaccaccgtcgctccaaacgctattcctcctccaccaccaacggcctcgccgccgaatcggttcccgacaaacgccacaagatctctctccctccgagtttcatttcatcctccgagatcgagtcagagttctcccaccacgaccccgccttcgcgcggatcaacaacggaagcttcggcagctgtccctcctccgtcatcgccgcccagcgggactggcagctccggttcctccgccagccggatcggttcttcttcgacgagctcaagcccaacatctccgcatccagagccgcgatcaaacgcctcatcaacgccgagcacgacgacgaggtctccctcgtcgacaacgccaccacggcggcggccatcgtcctccagcaaaccgcctgggccttccgggaaggccggttcgacagaggcgacgcggtggtgatgctccactacgccttcggctcggtgaagaaatcggtggaagcgtacgtctcacgctccggtggggaggtcatcgagatgcagctaccgttcccggttaactcggcggaagaaatagtcaaccggtttaggaccggtttagcattggggaaggcgaacggtaggaaggtcaggttagctttgatcgatcacgtgacgtcgatgcctagcgtcgtgataccgatcaaggagcttgtgaagatatgtagagaggaaggcgttgaccaagtgttcgttgacgctgctcatgggatcggttgtgtcgacgtggacatgaaggagattggcgctgacttctacactagtaacctccacaagtggttcttcgcgccgccttccgttgctttcttgtattgcaagaggtccggtgctggtggtaatctccatcatccggtcgtgtctcacgagtacgggaacggtttagcggttgagagcacgtgggtcgggactagagactacagtgctcagctggtcgtgccttcgattctggagtttgtgaaccggtttgaaggtgggatcgatggtataaagaagaggaaccatgagtcggtgattgagatgggggagatgctggtcaagtcttgggggacgcagctaggttgtccgccggagatgtgtccgagtatggtgatggttgggttgcctgtgtgtttaggtgtgtcgagtgagacggatgctgtgaggcttaggaaccttttgagagagaggttcagcattgagataccgacttactttagagcgcctggtgagggagagactgattcgatcacgggggaaacaagctatttcgagggggagtaa

SEQ ID NO: 212 - protein, 442 aa, Brassica napus
MASLSPPEEEAAAAAASFHHRRSKRYSSSTTNGLAAESVPDKRHKISLPPSFISSSEIESEFSHHDPAFARINNGSFGSCPSSVIAAQRDWQLRFLRQPDRFFFDELKPNISASRAAIKRLINAEHDDEVSLVDNATTAAAIVLQQTAWAFREGRFDRGDAVVMLHYAFGSVKKSVEAYVSRSGGEVIEMQLPFPVNSAEEIVNRFRTGLALGKANGRKVRLALIDHVTSMPSVVIPIKELVKICREEGVDQVFVDAAHGIGCVDVDMKEIGADFYTSNLHKWFFAPPSVAFLYCKRSGAGGNLHHPVVSHEYGNGLAVESTWVGTRDYSAQLVVPSILEFVNRFEGGIDGIKKRNHESVIEMGEMLVKSWGTQLGCPPEMCPSMVMVGLPVCLGVSSETDAVRLRNLLRERFSIEIPTYFRAPGEGETDSITGETSYFEGE

SEQ ID NO: 213 - DNA, 849 bp, Citrus clementina
atggatcaagaagctcgaaacggcgaattgactcaccacgtctctaaaaaacccaaactcactcgctgcatatccgaagccgaaatccgcgacgagttctctcaccaccaacacggcgttgcccgcatcaacaacgggagcttcgggagctgccccaagtccgtactcgccgaccagcaaaagtggcagctcaaattcctccaacaaccggacgacttctacttcaactctctccgcaaggggattctggagtcacgtgccgccgtcaaggacctcatcaacgccgatgacgtcggcgaaatctcacttgtcgacaacgcaaccaccgctgccgccatcgtcctccagcaaattggccgcggttttaccgaggggaggttccacagaaacgataccgttttgatgcttcactgcgccttccaagccgttaaaaaatctatccaagcttacgtcacccgtgcaggtgggtctgttgttgaagttcagttaccgtttccgttagcctcggaggaagaaattatcaatgagtttaaaaaggggattgaaaagggtaaaaaagatggaaaaatgatacggttagcaatcatcgatcacattacatcaatgccatgtgttgtgattcccgttcgtaaattggttaaaatttgtagagatgaaggtgtggatcaggtctttgtagatgcggcacatgctatgggtagtattaaaattgatgtgaaagaaattggagccgatttctatgttagtaatttgcacaagtggtttttttgcccaccatctgtagtcttcttgtattgcagaaaatcaattttatcgtctgatatgcatcaccccggtggtttcacctga

SEQ ID NO: 214 - protein, 282 aa, Citrus clementina
MDQEARNGELTHHVSKKPKLTRCISEAEIRDEFSHHQHGVARINNGSFGSCPKSVLADQQKWQLKFLQQPDDFYFNSLRKGILESRAAVKDLINADDVGEISLVDNATTAAAIVLQQIGRGFTEGRFHRNDTVLMLHCAFQAVKKSIQAYVTRAGGSVVEVQLPFPLASEEEIINEFKKGIEKGKKDGKMIRLAIIDHITSMPCVVIPVRKLVKICRDEGVDQVFVDAAHAMGSIKIDVKEIGADFYVSNLHKWFFCPPSVVFLYCRKSILSSDMHHPGGFT

SEQ ID NO: 215 - DNA, 1335 bp, Citrus sinensis
atggatactattggagctgatactaaaatatccaatacctacttgcctgaaaagcctgaactttcaccaactttgatttcagacactgaactcctatctgaattctcacaccatgtccaaaacatagctagaatcaataatggaagctttggttgttgcccgaagagtgttatatcagcacagcagaagtggcaacttgagttcctcaaacaacctgatgacttttacttcaatcggctgaaagatgagattttgaaatccagactcgtgatcagagacttggtcaatgctgaccatgttgatgaaatatcaattgttgataatgccaccactgctacagccattgtgttgcagagtgttgcttgggaatttttgcaagggaagtttaacaaaggtgatgctgttgtcatgcttcaatatgcttatggtgctgtgaaaaaatctctggaagcatatgttacgcgtgcaggtgggtatgttattgaagcttggtttctatttcctgttaattctgatggtgagattgtcagtgagtttcggaaagctttagaaagagggaaagccaatggtaggaaagtcagattggctatgattgatcatgtgacgtctattcctagtgttccgattccggttaaagaattgatcaagatttgtcgggaagagggtgtcgataaagtatttgttgatggtgcacaggggattgggtgtgttgatgttgacatgaaagaaattggggctgatttttacactggtactttgaacaagtgggttttttgcccgcctggggcagcgtttttgtattgtaggaaatcaaatgaaattgatgatttgcatcaccctgtggtgtctcatgagtatggaaatgggttggctatcgagagtgcttggattggaactagggattatagtgcccaactggtggttcctcaagctttggagtttgttaacagatttgaagggggaattgaaggaatcaagaagaggaatcataaagctgttgttgagatgggggagatgttggcaaaagcatggggaacccatcttgggtctcctccggagatgtgttcaagcatgatcatggttggcttgcctgctattttgggtatttctagtgattccattgctttaaagttgagaacccacttgaggaataatttttctgttgaagtacctatctattatagggtaccgggtgatggagtggttaacccagttacaggatacgctcgaatttctcatcatgtttacaacaagccagatgaatactacaagttcagagatgcagttaatcaacttgttaatgataagttcacttgtgcacttctcgcatggtaa

SEQ ID NO: 216 - protein, 444 aa, Citrus sinensis
MDTIGADTKISNTYLPEKPELSPTLISDTELLSEFSHHVQNIARINNGSFGCCPKSVISAQQKWQLEFLKQPDDFYFNRLKDEILKSRLVIRDLVNADHVDEISIVDNATTATAIVLQSVAWEFLQGKFNKGDAVVMLQYAYGAVKKSLEAYVTRAGGYVIEAWFLFPVNSDGEIVSEFRKALERGKANGRKVRLAMIDHVTSIPSVPIPVKELIKICREEGVDKVFVDGAQGIGCVDVDMKEIGADFYTGTLNKWVFCPPGAAFLYCRKSNEIDDLHHPVVSHEYGNGLAIESAWIGTRDYSAQLVVPQALEFVNRFEGGIEGIKKRNHKAVVEMGEMLAKAWGTHLGSPPEMCSSMIMVGLPAILGISSDSIALKLRTHLRNNFSVEVPIYYRVPGDGVVNPVTGYARISHHVYNKPDEYYKFRDAVNQLVNDKFTCALLAW

SEQ ID NO: 217 - DNA, 864 bp, Gossypium hirsutum
atgcagcacgatgaccctagaaacggtgagtcgactcaccgcagctccaagaaacccaaaatttcatctcagttcattactgagtcggatatccgagacgagttctctcaccaccacccacgtgtcgcacgcatcaacaacgggagtttcggtagctgtcccggttcggttcttgctgcccaacgccattggcagctacagttcctccgtcaacctgatgccttttactttaattcccttcgtgacggaataacggcttcgcggaaaattataaaggacctcatcaacgccgaccacgtcgacgaggtctccctcgtcgataacgccacaaccgctgcggccatcgtgctccaacggatcggccgcagtttcgccgaagggaagttccagaaaaatgacactgttttgatgctccactgcgcgtatgaagccgttaaaaaatcaatccaagcgtacgtcacccgggccggcggctcggtcattgaggtacggcttccattcccggtaaattcagaggaggaaatcatatccgaactcaaaaaatcgatcgacgaaggaaaattcaacggtagaaggataaggttagcgattatcgatcatattacatcaatgccatcggttgttattccgttaaaagagttagttaggatttgtagagcggaaggaatagagcaggttttcgtagacgcggctcacgctattgggagcgtgaaagtggatgtcaaagaagttggagccgatttttatgttagcaatttacataaatggttcttttgcccgccttctgtggcatttttatactgtaataaatcgactacatcgtctgatttgcatcaccctgttattgtctcgtcctctgcctga

SEQ ID NO: 218 - protein, 287 aa, Gossypium hirsutum
MQHDDPRNGESTHRSSKKPKISSQFITESDIRDEFSHHHPRVARINNGSFGSCPGSVLAAQRHWQLQFLRQPDAFYFNSLRDGITASRKIIKDLINADHVDEVSLVDNATTAAAIVLQRIGRSFAEGKFQKNDTVLMLHCAYEAVKKSIQAYVTRAGGSVIEVRLPFPVNSEEEIISELKKSIDEGKFNGRRIRLAIIDHITSMPSVVIPLKELVRICRAEGIEQVFVDAAHAIGSVKVDVKEVGADFYVSNLHKWFFCPPSVAFLYCNKSTTSSDLHHPVIVSSSA

SEQ ID NO: 219 - DNA, 1347 bp, Glycine max
atggaaaacgacaacaccacccacctaaacggcaccggcaagaaacccaagctcgcgcacgtcacgcacaccatttccgaggccgagatccgcgaggaattctcccaccaccaccgcggcgtcgccagaatcaacaatggcagctttggcagctgcccgcattccgtcctcgccgcgcagtccacctggcagctccgcttcctccagcagcccgacgacttctacttcaacgcgctccgccccggtatcctcgcctcacgcgccgccatccaagacctcatcaatgccggccacgtggacgacgtctccctcgttgacaacgccaccaccgccgccgccgtcgtcctccagcagatcggccgccgcttcgtccgcggctacttccaccggaacgacgccgttgtgatgttccactgcgcctaccaggccgtgaagaaatccattgaagcttacgtcagtcccatcggcggcaccatcgtcgaggttgaactcccctttccggtgcgctcggaggaagaaatcataacggagttcaagaaaggcctcgagaaaggtaaactcaacggcggaagagttaggttagcgataatcgatcacataacttccatgccttcgttcgttctccccgttcgcgaattgatcagggtttgcagagagcacggagtggagcaggttttcgtcgacggcgctcacgccattggaagcgtccccgtggacgttaaggaaattggagctgatttttacgtgagcaatttgtacaagtggtttttctcgccgccttcggtggcgtttttgtattgtaaggaaaaatcaaacgacgtgcaccaccctgtcgtttcacaggagtacgggaagggcctaccggttgagagtgcgtgggtggggatgcgtgactatagcccccagcttgttgtgccatcgattttggagttcgtgaatcggtttgagggtgggattgaggggattatgaagaggaaccatgacggggttgtgaaaatgggaaccatgttggcggagtcgtggggaacggttctggggtcgcctcctgatatgtgtgctagcatgattatggtggggttgccttctaggttgcgtgtgatgagtgttgatgatgcattgaggttaaggtcgtaccttagggtttatcatgcagttgaagttcctgtgtattaccaggctttgaggaatggtgatagggatcctagggacaaggatgggtttataactggttacgtaaggatatctcatcaagtttataatactgctgatgattatgagaggcttaagactgcgatcaatcagcttgtggaggacgggaaagtttgcagcgggcttcctaaggagtga

SEQ ID NO: 220 - protein, 448 aa, Glycine max
MENDNTTHLNGTGKKPKLAHVTHTISEAEIREEFSHHHRGVARINNGSFGSCPHSVLAAQSTWQLRFLQQPDDFYFNALRPGILASRAAIQDLINAGHVDDVSLVDNATTAAAVVLQQIGRRFVRGYFHRNDAVVMFHCAYQAVKKSIEAYVSPIGGTIVEVELPFPVRSEEEIITEFKKGLEKGKLNGGRVRLAIIDHITSMPSFVLPVRELIRVCREHGVEQVFVDGAHAIGSVPVDVKEIGADFYVSNLYKWFFSPPSVAFLYCKEKSNDVHHPVVSQEYGKGLPVESAWVGMRDYSPQLVVPSILEFVNRFEGGIEGIMKRNHDGVVKMGTMLAESWGTVLGSPPDMCASMIMVGLPSRLRVMSVDDALRLRSYLRVYHAVEVPVYYQALRNGDRDPRDKDGFITGYVRISHQVYNTADDYERLKTAINQLVEDGKVCSGLPKE

SEQ ID NO: 221 - DNA, 1356 bp, Glycine max
atgtcttccaccaccattcacgaaaacaaccaccacaacggctcccacatacccaaaaaacccaaactctcttccaccttcataactccgtcggaaatcgaatccgaattcggccaccacgacgctgccgtcgcgcgcatcaacaacggcagcttcgggtgctgcccggcctccatcctcgccgcgcagcgccgctggcagctccagtacctccgccaacccgaccacttctacttcaacgatctccaatccggcatcctccaatcccgaaccctaatcaaggacctcgtcaacgccgaccacgtcaatgagatctccatcgtcgacaacgccaccaccgccgccgccatcgtcctccaacacaccgcctggaacttccgcgaagggaagttccaaaaaggcgacgtcgtcctcatgctccactacgcctacggcgccgttaagaaatccatggaagcctacgtcacgcgcgccggaggtaacgtcgttgaggtcccgttacctttccccgttaattccaacgacgagatcgtttccgagtttagaaaagctttggagagaggaaagagtaacggaaatagggttaggttagcggtgatagatcacgtgacttccatgccatgtgttgttattcccgttaaagagttgattcagatttgcagggaggaaggggtagatcaggtttttgtcgacgctgcacattccattgggtgcactgatgttgatatgaaggagattggtgctgatttttatactagtaatttgcacaagtggttcttttgtccaccttcaattgcgtttttgtacactcgtaggaaccttaagggtactgatcctggttctgatttgcatcaccctgtggtgtctcatgagtatggaaatggtttggctgtggagagtgcttggattgggaccagggattatagtgctcagttggtggttccggccgcggtggagtttgttaaccggtttgaaggagggattgaggggatcaagaagaggaatcatgaggctgttgtggagatgggggagatgctggcgaaggcgtgggggactcggctagggagtcccccgcatatgtgtgctagcatggttatggttggcttgccggcttgtttgggaattgggagtgattctgatgccctcaagttgaggacacatttgagggatgcttttggcgttgaggttccaatatactatagatcgccgagagagggagaagttggggtggttactggatatgcgaggatttctcatcaggtgtataacaaggttgatgactattacaagtttagggatgcggttaaccagcttgtgcaaaatgggttcacttgtgttgttctttcgtcggattga

SEQ ID NO: 222 - protein, 451 aa, Glycine max
MSSTTIHENNHHNGSHIPKKPKLSSTFITPSEIESEFGHHDAAVARINNGSFGCCPASILAAQRRWQLQYLRQPDHFYFNDLQSGILQSRTLIKDLVNADHVNEISIVDNATTAAAIVLQHTAWNFREGKFQKGDVVLMLHYAYGAVKKSMEAYVTRAGGNVVEVPLPFPVNSNDEIVSEFRKALERGKSNGNRVRLAVIDHVTSMPCVVIPVKELIQICREEGVDQVFVDAAHSIGCTDVDMKEIGADFYTSNLHKWFFCPPSIAFLYTRRNLKGTDPGSDLHHPVVSHEYGNGLAVESAWIGTRDYSAQLVVPAAVEFVNRFEGGIEGIKKRNHEAVVEMGEMLAKAWGTRLGSPPHMCASMVMVGLPACLGIGSDSDALKLRTHLRDAFGVEVPIYYRSPREGEVGVVTGYARISHQVYNKVDDYYKFRDAVNQLVQNGFTCVVLSSD

SEQ ID NO: 223 - DNA, 1362 bp, Glycine max
atggtgaaatccctgttcctgatttctcgaatcccaatgtcttccaccaccatccaccacaacggctcccacatacccaaaaaacccaaactctcttccttggaaatcgaatcagaattcggccaccacgactcctccgtcgcccgcatcaacaacggcagcttcgggtgctgcccggcctccatcctctccgctcaacgccgctggcagctccagtacctccgccagcccgaccacttctacttcaacgacctcaaatccgccgtcctccaatcccgaaccttaatcaaggacctcgtcaacgccgaccacgtcgacgagatctccattgttgacaacgccaccaccgccgccgccatcgtcctccagcacaccgcctggaacttccgcgaaggaaagttccagaagggtgacgtcgtcctcatgctccactacgcctacggcgccgttaagaaatccatggaagcctacgtcacgcgcgccggaggtaacgtcgtcgaggtcccgttacctttccccgttaattccaacgatgagatcgtttccgagtttaggaaagcgttagagagaggaaagagtaatgggaatagggttaggttagcggtaattgatcatgtgacttccatgccgtgtgttgttattcccgttaaagagttgattcagatttgcagggaggaaggtgtggaccaggtttttgttgacgctgcacattccattgggtgtactgatgttgatatgaaggagattggtgctgatttttatactagtaatttgcataagtggttcttttgtccaccttctattgcgtttttgtacactcgtaggaactttaaaggtactggttctggttctgatttgcatcaccctgtggtgtctcatgagtatggcaatggtttggctgtggagagtgcttggattgggactagggattatagtgctcagttggtggttccggccgcagtggagtttgttaaccggtttgaaggagggattgaggggatcaagaagaggaatcatgaggctgttgtggagatgggggagatgctggtgaaggcgtgggggactcggcttgggagtcccccacatatgtgtgctagcatggttatggttggcttgcctgcttgtttggggattgagagtgattctgatgccctaaagttgaggacacatttcagggatacttttggggttgaggttccgatatactatcggcccccaaaagaaggggaagttggggtggttactggatatgccaggatttctcatcaagtgtataacaaggttgatgactattacaagttcagggatgcagttaaccagcttgtgcaaaatgggttcacttgtgctgttctttcggattga

SEQ ID NO: 224 - protein, 453 aa, Glycine max
MVKSLFLISRIPMSSTTIHHNGSHIPKKPKLSSLEIESEFGHHDSSVARINNGSFGCCPASILSAQRRWQLQYLRQPDHFYFNDLKSAVLQSRTLIKDLVNADHVDEISIVDNATTAAAIVLQHTAWNFREGKFQKGDVVLMLHYAYGAVKKSMEAYVTRAGGNVVEVPLPFPVNSNDEIVSEFRKALERGKSNGNRVRLAVIDHVTSMPCVVIPVKELIQICREEGVDQVFVDAAHSIGCTDVDMKEIGADFYTSNLHKWFFCPPSIAFLYTRRNFKGTGSGSDLHHPVVSHEYGNGLAVESAWIGTRDYSAQLVVPAAVEFVNRFEGGIEGIKKRNHEAVVEMGEMLVKAWGTRLGSPPHMCASMVMVGLPACLGIESDSDALKLRTHFRDTFGVEVPIYYRPPKEGEVGVVTGYARISHQVYNKVDDYYKFRDAVNQLVQNGFTCAVLSD

SEQ ID NO: 225 - DNA, 1341 bp, Glycine max
atggcctccaacggcgacgccgttcatccccacccttccaaaaagatcaaactcttcagcaattccattaactcaactaattcctcgtttatcacccatgccgagatcgaatcggaattctcccaccaccaccccacggtggcgcgcctcaacaacggcgccttcgggtgctgcccggcttccgtgatcgccgtgcagcgcgagtggcagatgaagaacctccggcaaccggaccacttctacttcaacgacctcaagaagggactccttcactcccgcaccatcatcaagaacctcgtcaacgccgaacacgtggacgagatctccctcgtcgacaacgcctccaccgccaccgccatcgtcctccagcaagccgcctgggccttccaggaagcaaaattccagaaaggcgacgtggtcctcgtgctccactacgcctacggcgccgtcaagaaagccatcgaggcctacgtggtgcgcgccggaggcaccgttatcgaagtccccctccccttccccgtcacctccaacgacgacgtagtcaacgaattccgaaaagcccttgagaggggcaagtcccgaggcaacagaattcgcttagcggttatcgaccacgtgacttccatgcccagcgtggtcatccccgttaaggacttggttaaaatctgcagagaggagggtgtggagcaggtattcgtggacgcggcacactcgattgggtgcacgcgcgtggacatgcaggagatcggagcggacttctacaccagcaacttgcacaagtggttcttctgccctccctccgtggcgttcctctacgcacgtgcctcctctaaggcacgtgacctgcaccatcccgtggtgtcgcacgagtacgggaaggggttggccgtggagagctcgtggaccgggaacagggactacagcgcgcagctggtggttccggcggttatggagttcgtgaaaaggttcgagggtgggattgaagggatcagaaagaggaaccatgatttggttgttgagatgggggagatgctggtggaggcttgggggacccaccttgggagtccttcgcatatgagtgctagcatggtgatggtgggtttgcctccttctttgggtattgggagtgactctgatgctcaaaagcttaggacccgtttgagggatgaatttgatgttgaagtaccaatttattttcgtggtggggaagatggctctgttactgcgtatgcacgaatttctcgtcaggtttacaacaaggttgaggactattataagttcaggaatgcggttaatcaacttgtgcaagatgggtttacttgtgctcttctttcggcttga

SEQ ID NO: 226 - protein, 446 aa, Glycine max
MASNGDAVHPHPSKKIKLFSNSINSTNSSFITHAEIESEFSHHHPTVARLNNGAFGCCPASVIAVQREWQMKNLRQPDHFYFNDLKKGLLHSRTIIKNLVNAEHVDEISLVDNASTATAIVLQQAAWAFQEAKFQKGDVVLVLHYAYGAVKKAIEAYVVRAGGTVIEVPLPFPVTSNDDVVNEFRKALERGKSRGNRIRLAVIDHVTSMPSVVIPVKDLVKICREEGVEQVFVDAAHSIGCTRVDMQEIGADFYTSNLHKWFFCPPSVAFLYARASSKARDLHHPVVSHEYGKGLAVESSWTGNRDYSAQLVVPAVMEFVKRFEGGIEGIRKRNHDLVVEMGEMLVEAWGTHLGSPSHMSASMVMVGLPPSLGIGSDSDAQKLRTRLRDEFDVEVPIYFRGGEDGSVTAYARISRQVYNKVEDYYKFRNAVNQLVQDGFTCALLSA

SEQ ID NO: 227 - DNA, 1407 bp, Hordeum vulgare
atggcgtcgatcccgtctgatgaggtctccaagaacggtcacggcaacggaaacggcccatcgccgccgcgcgcgaagcgccctcgcgcagcgttcatctcggccgcccagatccgcgacgagttcgcgcaccacgaccccgcagttgcccgcgtcaacaacggcagcttcggctgctgcccggcctccgtgctcgaagcgcaggcccgctggcagcgcctcttcctcgctcagcccgacgccttctacttcgacggccttcagccggggctccgccgttcccgcgcagccgtcgcggcccttgtcaacgctggggacgtgtccgagatttccctcgtagacaacgctaccaccgctgctgcaatcgtgctgcagcatgccgcctggagctttgccgaggggcacttcgctcggggcgacgctgtgctcatgctccattacgcctatggagcagtcaagaaatctatccaggcctacgttgctcgcgcgggcgccactgtcgtcgaggtacccctcccgttccccgtcacctcccctcacgccattattgccgagttccatgctgcgctcgctgttgccaaggccggtggtcgtaaggtccggcttgctgtcattgaccacatcacctccatgcccagtgttctcattccagtcaaggagctagttgccatttgccgccaagagggcgtcgacaaagtttttgttgatgctgcacactctgttgggcaagtccctgtcgatgtgcgagacattggggcggatttctatactagcaacctccacaagtggttcttttgccccccagccgtggctttcttacacacccgcaagggtggcccaatagcttctcagctccaccaccctgtcgtgtcacatgaatatggcaatgggctacctatggagagtggatggattgggacacgggattacagtgcccagatagtcgttcctgaagctattgactttgtgaaccggtttgaaggtgggattgaggggatacgcagccggaaccatgagaaggtggtcgagatggggaggatgcttgccgaagcatgggggacatttcttggatcaccaccagtaatgtgcggaagcatggttatggtagggatgcctagttgtctttgcattgagagtgatgatgatgcactgagagtgcggaccatgttgaggaaggatttcaaagttgaggtgcctatatactacaataccagacaggttgaagtgcaagagatagcaaaggataataatagtgatccagtgacggggtatgtaagaatctcacaccaggtttacaatgtcaaggaagagtatgagaggctgagagatgctgtcaataagcttgttgctgaggggttcaccagcgccgaattgaggccagctgagaagcaagaaactctggcttga

SEQ ID NO: 228 - protein, 468 aa, Hordeum vulgare
MASIPSDEVSKNGHGNGNGPSPPRAKRPRAAFISAAQIRDEFAHHDPAVARVNNGSFGCCPASVLEAQARWQRLFLAQPDAFYFDGLQPGLRRSRAAVAALVNAGDVSEISLVDNATTAAAIVLQHAAWSFAEGHFARGDAVLMLHYAYGAVKKSIQAYVARAGATVVEVPLPFPVTSPHAIIAEFHAALAVAKAGGRKVRLAVIDHITSMPSVLIPVKELVAICRQEGVDKVFVDAAHSVGQVPVDVRDIGADFYTSNLHKWFFCPPAVAFLHTRKGGPIASQLHHPVVSHEYGNGLPMESGWIGTRDYSAQIVVPEAIDFVNRFEGGIEGIRSRNHEKVVEMGRMLAEAWGTFLGSPPVMCGSMVMVGMPSCLCIESDDDALRVRTMLRKDFKVEVPIYYNTRQVEVQEIAKDNNSDPVTGYVRISHQVYNVKEEYERLRDAVNKLVAEGFTSAELRPAEKQETLA

SEQ ID NO: 229 - DNA, 1353 bp, Medicago truncatula
atggataaccacgacgatcctcgaaacggcaccgttcagccagactcaaagaaaccaaaacttacccaccccatttcctcacacgaacttcttcacgaattctcccaccaccaaaccgccgtcgcacgtatcaacaacggcagcttcggcagctgtccccgctccatcctcaccgcccaaaccacctggcagcttcgcttccttcaacaacccgacgatttcttcttcaacaccctccgtaacggaattctcgattctcgcaaaatcatcaaaaacctaatcaatgctgacgacgttgaagaaatttcgttaatcgataatgctaccaccgctgccgctatcgttcttcaacaaatcggccatcacttctcctccggtaagttctgccgaaatgacactgttataattttccattgcgcttatcaagctgttaagaaatcaattgaagcttatgttatacccgttggtggctctgttattgaggttgaattaccttttccggttaattccaacgaggaaattatcgcggaatttaagaaagggattgaacgagggaaaattaacggtggtagagttaggttagcgataatcgatcacattacgtcgatgccttcggttgttattccggttagggaattgattcgggtttgtagagagaatgaagtggatcaggtttttgttgatggtgctcatgctttaggaagtatggaggttgatgttaaagaaattggtgctgatttttatgttagtaatttgtataaatggtttttttcgccaccttcggttgcgtttatgtattgtaataagaataagaaattgaatgatgttcatcatccagtggtggcgcatgagtatggtaatggtttgcctgctgaaagtgcttgggttgggatgagagattatagtcctcagcttgtggtgccttcgattatggagtttgtgaatcggtttgaaggtggaattgaagggattatgaagaggaaccataatatggttgtgaaaatgggggttatgttgaaggaagcgtggggtacgaatcttgggtcgccgcctgaaatgtgtgcaagtatgattatgattggcttgccttcgaagattcgggtgatgagtgatgatgatgctttgagattaaggttttatcttagggtttatcatgctatagaagttcctgtgtattatcaggctttgggaaatggtgaaagggatgctagagataaagacgggtttataactggttatgtgaggatttctcatcaggtgtataacattgttgatgattataataggcttaagactgcaattattcagcttttgcaagatggaaaaatttgcagtgaacttcctaaagagtga

SEQ ID NO: 230 - protein, 450 aa, Medicago truncatula
MDNHDDPRNGTVQPDSKKPKLTHPISSHELLHEFSHHQTAVARINNGSFGSCPRSILTAQTTWQLRFLQQPDDFFFNTLRNGILDSRKIIKNLINADDVEEISLIDNATTAAAIVLQQIGHHFSSGKFCRNDTVIIFHCAYQAVKKSIEAYVIPVGGSVIEVELPFPVNSNEEIIAEFKKGIERGKINGGRVRLAIIDHITSMPSVVIPVRELIRVCRENEVDQVFVDGAHALGSMEVDVKEIGADFYVSNLYKWFFSPPSVAFMYCNKNKKLNDVHHPVVAHEYGNGLPAESAWVGMRDYSPQLVVPSIMEFVNRFEGGIEGIMKRNHNMVVKMGVMLKEAWGTNLGSPPEMCASMIMIGLPSKIRVMSDDDALRLRFYLRVYHAIEVPVYYQALGNGERDARDKDGFITGYVRISHQVYNIVDDYNRLKTAIIQLLQDGKICSELPKE

SEQ ID NO: 231 - DNA, 1368 bp, Medicago truncatula
atggcctctgagaaaaacaatcaccaccgttcaatcccagacatcaacggcacacaccccacccccaaaaaacctaaactctcttcttcttccaatttcatcaccgcttcagaaattcaatctgaattcagccaccacgactccgccgtctctcgcatcaacaacggcagcttcggctcctgtccttcctccatcctctccgctcaacaacaatggcagctcaagtatcttcgtcaacccgatcacttctacttcaaccacctcaaacccgccatcaacaactcccgctccattatccaaaacctagtcaacgctaaagacatcaacgaaatctctatcgtcgataacgccaccaccgccgccgctatcgttcttcaacacaccgcttggtgtttccgtgaaggtaaattcaacaaaggtgacgtcgttgttatgcttcattatgcttacggtgctgttaagaaatccatggaggcttacgtcactcgtgctggtgggaaagtgattgaagttccgttaccttttcctgtgagttccaatgatgagattgtgactgagtttagaaaagctttggaaaaagggaaagttgatgggaagaaaattaggttagctgtgattgatcatgttacttctatgccttgtgttgtgattcctgtgaaggaattgattcagatttgtagagaggaaggtgttgaacaggtttttgttgatgctgctcattcaattggctgtactgatgttgatatgcaagatattggtgctgatttttataccagtaatttgcataagtggttcttctgtccaccttcgatcgcttttttgtatactaaaaagaatcctaaaactggtggtggtggtgatttgcatcatcctgttgtgtctcatgagtatggaaatggattagctgtggaaagtgcttggattggcacaagggattatagtgctcaattggtggttcctgaagctttggaatttgtcaataggtttgaaggtgggattgaagggattaagaagaggaatcatgaagctgttattgagatgggagagatgttggtgaaagcttggggaactcatcttggaagtccgaaacatatgtgtgctagtatggttatggttggtttgcctacttgttttggggttagaagtgattctgatgcacttacgctgaggacacatttgagggatgtttttggagttgaagttcctatatattatagaccgcctagagatggagaagttgatcctgtgacggggtatgcaaggatttcttatcaggtttacaataaggttgaggactattacaagtttcgggatgctgttaaccaactggtggataatgggtttgcttgtactcttctttcaaaatga

SEQ ID NO: 232 - protein, 455 aa, Medicago truncatula
MASEKNNHHRSIPDINGTHPTPKKPKLSSSSNFITASEIQSEFSHHDSAVSRINNGSFGSCPSSILSAQQQWQLKYLRQPDHFYFNHLKPAINNSRSIIQNLVNAKDINEISIVDNATTAAAIVLQHTAWCFREGKFNKGDVVVMLHYAYGAVKKSMEAYVTRAGGKVIEVPLPFPVSSNDEIVTEFRKALEKGKVDGKKIRLAVIDHVTSMPCVVIPVKELIQICREEGVEQVFVDAAHSIGCTDVDMQDIGADFYTSNLHKWFFCPPSIAFLYTKKNPKTGGGGDLHHPVVSHEYGNGLAVESAWIGTRDYSAQLVVPEALEFVNRFEGGIEGIKKRNHEAVIEMGEMLVKAWGTHLGSPKHMCASMVMVGLPTCFGVRSDSDALTLRTHLRDVFGVEVPIYYRPPRDGEVDPVTGYARISYQVYNKVEDYYKFRDAVNQLVDNGFACTLLSK

SEQ ID NO: 233 - DNA, 1449 bp, Oryza sativa
atggcgtcgatcccgccggatgacgacgcggcggcggcggcggcggcgggggcggccgagaacgggtacgggaacgggaaggggaacggcaacgggccggcgccgcgcccgccgccggcgaagcggccgaggtcggtgatctcggcggcgcagatccgggcggagttcgagcaccacgaggccggggtggcgcgcgtcaacaacggcagcttcgggtgctgcccgtcctccctcctcgacgcgcaggcgcggtggcagcgcctcttcatcgcccagcccgacgacttctacttccacgccctccagccggggctccgccgctcgcgggctgccgtcgcgggcctcgtcaacgccggggacgtcgccgaggtctccctcgtcgacaacgccaccaccgccgccgccatcgtgctgcagcacgccgcgtggagcttcgccgaggggaggttctcccgcggggacgccgtgctcatgctccactacgcgtacggcgccgtcaagaagtccatccacgcctacgtcgcccgcgccggggccaccgtcgtcgaggtgccgctcccgttccccgtcgcgtccgcggacgccatcatcgccgagttccgcgccgcgctcgatgtggccaaggccggggggcgcaaggtccgcctcgcggtcatcgaccacatcacctccatgcctagcgttgtcatcccggtgaaggagctcgttgccatctgccgagaagagggtgtcgataaggtgtttatagatgccgcgcactccattgggcaggtccctgttgatgtgcgcgatattggggccgatttttacaccagcaatctccacaagtggttcttctgcccgcctgccgtggctttcttgcacacccgaaaggatgatccgatagcctcccagctccaccatcctgtggtgtcgcacgagtacggcaatgggcttcccatggagagtggatggattgggacaagggattacagtgcacagcttgtagtgcctgaatctattgattttgttaaccgatttgaaggtggcatcgagggaataaggagccgtaaccatgaaaaagtgatcgagatgggtaagatgcttgctgaggcatgggggacttttcttggcacaccaccagagctgtgcggtagcatggttatggttggtcttcccggttgccttggtgttgaaagtgatgatgatgtgatgagaatgagaacaatgttgaggaaggattttatggtggaggtgccaatatactacaattcgagaagagtagaagctcaagaaatggcaaaggataagaatggtgatgcagtcacagggtatgttaggatctcacaccaagtttacaatgtaacggaggattatgagaagctgagggatgctgtcaataagcttgttgctgatggattcaccagcagcaagttgcggccttcgcagaagcaggaaacgatggcctga

SEQ ID NO: 234 - protein, 482 aa, Oryza sativa
MASIPPDDDAAAAAAAGAAENGYGNGKGNGNGPAPRPPPAKRPRSVISAAQIRAEFEHHEAGVARVNNGSFGCCPSSLLDAQARWQRLFIAQPDDFYFHALQPGLRRSRAAVAGLVNAGDVAEVSLVDNATTAAAIVLQHAAWSFAEGRFSRGDAVLMLHYAYGAVKKSIHAYVARAGATVVEVPLPFPVASADAIIAEFRAALDVAKAGGRKVRLAVIDHITSMPSVVIPVKELVAICREEGVDKVFIDAAHSIGQVPVDVRDIGADFYTSNLHKWFFCPPAVAFLHTRKDDPIASQLHHPVVSHEYGNGLPMESGWIGTRDYSAQLVVPESIDFVNRFEGGIEGIRSRNHEKVIEMGKMLAEAWGTFLGTPPELCGSMVMVGLPGCLGVESDDDVMRMRTMLRKDFMVEVPIYYNSRRVEAQEMAKDKNGDAVTGYVRISHQVYNVTEDYEKLRDAVNKLVADGFTSSKLRPSQKQETMA

SEQ ID NO: 235 - DNA, 1440 bp, Oryza sativa
atggcctcgcttcagtccggcggcgacgcggccgcgaacggcgtcgacgccgacgtcgacggcgccgcgtccccgccctcggcgaagcggccccgcgcgggcgcgggcgcggcggcgatcacggacgccgaggtccgggccgagttcgcgcaccacgaccgcgccgtggcgcgcctgaacaacggcaccttcggctgctgcccggcgtcggtgctggcggcgcgggcgcggtggcagcgcctgttcctgtcgcagcccgacgcgttctacttccaccacctccagcccgggctcgcccgctcccgcgccgcggtcgccgcggccgtcggcgccggggacgcctccgaggtctccctcgtcgacaacgtcaccacggccgccgccatcatcatgcagcacgtcgcctggagcttcgccgagggggacttcgcgcgcggggacgtcgtgctcatgttcctctacacctactgctccatcaagaactccatccacgcgtacgtggcccgcgcgggcgccaccgtcgtcgaggtgcccctcccgttccccgtctcctccccggacgccatcgtcgccgagttccgcgcggcgctcgcggtggccagggacggcggtcgccgccgcgtccgcctcgccgtcatcgaccacatcaccgccatgcccaccgtcctcatcccggtcaaggagctcgtcgccatctgccgcgaggagggcgtcgacaaggtgttcgtcgacgcggcgcacgccgtggggcaggtccccgtcgacgtgcgcgacatcggcgccgacttctacgccagcaacctccacaagtggttcttctgcccctccgccgtcgccttcatccacacgcgcaaggacgaccccgtctcctccaagctccaccaccccgtcgtctccagcgagtacggcaacggcctccccatggagagcgcctggatcggggtgcgcgactacagcgcgcagctcgtggtcccggacgtcgtcgacttcgtcaatcgcttcgacggcggcgtggaggggatacgccgccggaaccacgacaaggtggtcgagatgggcacgatgctcgccgccgcgtggggcacgttcctcggcacgccgccggagatgtgcgggagcatgctcatggtggggctgcccggctcgctgggcgtcgggagcgaggacgacgccgtcggcctgaggacgatgctgaggaagcagttcaaggtggaggtgccgctctactacaactccaaggcggcggcggcggatgcgccgccggagatggtcaaggacggcaatggcgatccggtgacggggtacgtgaggatctcgcaccaggtgtacaacgtccgggaggaatacgaggcgctcagggacgcggtcgccaagctcgtcgccgacggcttcacctgcagaaagttacggcctcctgagaaggaagaaactctggcatga

SEQ ID NO: 236 - protein, 479 aa, Oryza sativa
MASLQSGGDAAANGVDADVDGAASPPSAKRPRAGAGAAAITDAEVRAEFAHHDRAVARLNNGTFGCCPASVLAARARWQRLFLSQPDAFYFHHLQPGLARSRAAVAAAVGAGDASEVSLVDNVTTAAAIIMQHVAWSFAEGDFARGDVVLMFLYTYCSIKNSIHAYVARAGATVVEVPLPFPVSSPDAIVAEFRAALAVARDGGRRRVRLAVIDHITAMPTVLIPVKELVAICREEGVDKVFVDAAHAVGQVPVDVRDIGADFYASNLHKWFFCPSAVAFIHTRKDDPVSSKLHHPVVSSEYGNGLPMESAWIGVRDYSAQLVVPDVVDFVNRFDGGVEGIRRRNHDKVVEMGTMLAAAWGTFLGTPPEMCGSMLMVGLPGSLGVGSEDDAVGLRTMLRKQFKVEVPLYYNSKAAAADAPPEMVKDGNGDPVTGYVRISHQVYNVREEYEALRDAVAKLVADGFTCRKLRPPEKEETLA

SEQ ID NO: 237 - DNA, 1566 bp, Physcomitrella patens
atgcaaatcaagaggggaattattgaagcagttgatgaaggcggtgggtctcaaccactagcagaacccgcgcatcatgaagcaggaaaagctgaggaggatgatgaagcgggatatggagagggtaagcgtccacccggcgagctttgtaacggagaatctttgtctccatcaagagtttgccagggcaattccgcccttctaattgcagagcttctctccgcaggaaaagctggaattccgggaaaattgctcgatacggcggaagatgatgatgctgaatcgaaaagagtagtggacaggaagaatttgagcatttcaattgaggaggaattttcacatcacaagccagggttagcaagattgaacaatggcagcttcggaagctgtccacaatctgtgttagctgcacaagagaattgctctcgttgttggttacgccagcctgataaaagctactttggtcctttggaggaggggttgtatcgcgcgaggaaagaggttgctgaccttgtcaatgcacctgttgaagaagtatttcttctggaaaatgtaaccgcagctgcttccatggtggcattggatgtcatgtgggctttcgctgaaggtcgttataagaagggagactcaatattgatgttgaatttcacatacggagctttgaagaagtcttttcaagcttatgctgcaagagctgggggaagaatctttcaagttcagattccctttccagtgtcatccgaggagcagattttgcaagtcttcgaagaagcattggaggaggagagagaggagaatccatcaagcataattcgcatggcggtcttcgaccacatcgtctccatgcccacaatgatactcccaatacggcaacttataaagctctgtcgcagctatggtgtagagaacattttcattgatggagcacacggcattggaaaccttgaattgaacctgacagaacttgacgctgattattacacgagcaacctgcacaagtggatgtttgcacccaccaccgctgcttttgttcattgcaaagcgaagcaccttggtcggctgcatcacccgattgtctcacatttgtatggtgttggaattgcggctgaatgctcgtggttaggcacccgggattacagccctcttctcgcagttccagcagcaattaagtttgtgattgacgtagctggtagtatcgagaactatagcaaatttaatcactgcaaggttgtagcaatggcggagatgctcgcgagttcgtggggtacattcttgggcacaccaccggagatgtgtgcggcgatggctatggttgctctgccccctgccttgaacatccattcgcaggtggatttattagctctgcgaaggcgtatccgagaagagtatcaggtggacgtgcatctgtactatgcaggaagtttagcgccagccaatattgacgatgcgtctcaaggaaggacgaggaccaccgcttacgtgcgtatatcccatcaaatttataacaacagtgacgagtatataaagctgagagatgttgtcaatgacattgcacgtaaaagttag

SEQ ID NO: 238 - protein, 521 aa, Physcomitrella patens
MQIKRGIIEAVDEGGGSQPLAEPAHHEAGKAEEDDEAGYGEGKRPPGELCNGESLSPSRVCQGNSALLIAELLSAGKAGIPGKLLDTAEDDDAESKRVVDRKNLSISIEEEFSHHKPGLARLNNGSFGSCPQSVLAAQENCSRCWLRQPDKSYFGPLEEGLYRARKEVADLVNAPVEEVFLLENVTAAASMVALDVMWAFAEGRYKKGDSILMLNFTYGALKKSFQAYAARAGGRIFQVQIPFPVSSEEQILQVFEEALEEEREENPSSIIRMAVFDHIVSMPTMILPIRQLIKLCRSYGVENIFIDGAHGIGNLELNLTELDADYYTSNLHKWMFAPTTAAFVHCKAKHLGRLHHPIVSHLYGVGIAAECSWLGTRDYSPLLAVPAAIKFVIDVAGSIENYSKFNHCKVVAMAEMLASSWGTFLGTPPEMCAAMAMVALPPALNIHSQVDLLALRRRIREEYQVDVHLYYAGSLAPANIDDASQGRTRTTAYVRISHQIYNNSDEYIKLRDVVNDIARKS

SEQ ID NO: 239 - DNA, 1566 bp, Physcomitrella patens
atgcaaatcaagaggggaattattgaagcagttgatgaaggcggtgggtctcaaccactagcagaacccgcgcatcatgaagcaggaaaagctgaggaggatgatgaagcgggatatggagagggtaagcgtccacccggcgagctttgtaacggagaatctttgtctccatcaagagtttgccagggcaattccgcccttctaattgcagagcttctctccgcaggaaaagctggaattccgggaaaattgctcgatacggcggaagatgatgatgctgaatcgaaaagagtagtggacaggaagaatttgagcatttcaattgaggaggaattttcacatcacaagccagggttagcaagattgaacaatggcagcttcggaagctgtccacaatctgtgttagctgcacaagagaattgctctcgttgttggttacgccagcctgataaaagctactttggtcctttggaggaggggttgtatcgcgcgaggaaagaggttgctgaccttgtcaatgcacctgttgaagaagtatttcttctggaaaatgtaaccgcagctgcttccatggtggcattggatgtcatgtgggctttcgctgaaggtcgttataagaagggagactcaatattgatgttgaatttcacatacggagctttgaagaagtcttttcaagcttatgctgcaagagctgggggaagaatctttcaagttcagattccctttccagtgtcatccgaggagcagattttgcaagtcttcgaagaagcattggaggaggagagagaggagaatccatcaagcataattcgcatggcggtcttcgaccacatcgtctccatgcccacaatgatactcccaatacggcaacttataaagctctgtcgcagctatggtgtagagaacattttcattgatggagcacacggcattggaaaccttgaattgaacctgacagaacttgacgctgattattacacgagcaacctgcacaagtggatgtttgcacccaccaccgctgcttttgttcattgcaaagcgaagcaccttggtcggctgcatcacccgattgtctcacatttgtatggtgttggaattgcggctgaatgctcgtggttaggcacccgggattacagccctcttctcgcagttccagcagcaattaagtttgtgattgacgtagctggtagtatcgagaactatagcaaatttaatcactgcaaggttgtagcaatggcggagatgctcgcgagttcgtggggtacattcttgggcacaccaccggagatgtgtgcggcgatggctatggttgctctgccccctgccttgaacatccattcgcaggtggatttattagctctgcgaaggcgtatccgagaagagtatcaggtggacgtgcatctgtactatgcaggaagtttagcgccagccaatattgacgatgcgtctcaaggaaggacgaggaccaccgcttacgtgcgtatatcccatcaaatttataacaacaatgacgagtatataaagctgagagatgttgtcaatgacattgcacgtaaaagttag

SEQ ID NO: 240 - protein, 521 aa, Physcomitrella patens
MQIKRGIIEAVDEGGGSQPLAEPAHHEAGKAEEDDEAGYGEGKRPPGELCNGESLSPSRVCQGNSALLIAELLSAGKAGIPGKLLDTAEDDDAESKRVVDRKNLSISIEEEFSHHKPGLARLNNGSFGSCPQSVLAAQENCSRCWLRQPDKSYFGPLEEGLYRARKEVADLVNAPVEEVFLLENVTAAASMVALDVMWAFAEGRYKKGDSILMLNFTYGALKKSFQAYAARAGGRIFQVQIPFPVSSEEQILQVFEEALEEEREENPSSIIRMAVFDHIVSMPTMILPIRQLIKLCRSYGVENIFIDGAHGIGNLELNLTELDADYYTSNLHKWMFAPTTAAFVHCKAKHLGRLHHPIVSHLYGVGIAAECSWLGTRDYSPLLAVPAAIKFVIDVAGSIENYSKFNHCKVVAMAEMLASSWGTFLGTPPEMCAAMAMVALPPALNIHSQVDLLALRRRIREEYQVDVHLYYAGSLAPANIDDASQGRTRTTAYVRISHQIYNNNDEYIKLRDVVNDIARKS

SEQ ID NO: 241 - DNA, 1464 bp, Prunus persica
atgactgggaatgcaggatcatctacgcaagaaaaccactttcgacaacggctaagggtcatggccgagaagattgttatattttgccgttactacgttccacttattgttcttcttccttatcgaaccctccaattcttctaccaaatcaaaacccaagttcccattgagccaaaacactcttcttccttcatcacagactccgaaatccaatccgaatttgctcaccatgctcctggtgttgccatgatgaacaatggcagctttggttgctgccctgcttctgtcatctctgccttgcatcaatggcagctcaaaatgttccgccagccgagccatttcttattgaatgagctcaagaacaggatacttgaatcaagaaccataattaaagaccatatcaacgcagaagatgtggatgaagtctccattgtagacaacatctccactgctgctgccatagtcctgcagcaaacagcatgggcctttgctgaagggaaattcaacaaaggggatgctgtcattatgtttagctgcacttacggtgcggtgaagaactcaatcgaggcctacttttcacgtgctggtgggtccgttatcgaagttccatttaactttccattgaattccaatgaagaaatcataagtgaatttaggaaagcattggagagagaaaagggtaatggtaggagagtgagattggctgtgattgatcatgttacatgtgtgccaactgttgtaatgccagttaagcaattggttaaaatctgtagggatgaaggtgttgaacaagtgttcatagatgcagctcatgctgttgggagcgtagatgttgatatgcaagaaattggggcagatttttatgctagtactttgtataagtggttcttctgcccgcctgttgtttcatttctgtattgtaggaaatcagctacacattcagatttggaattgcatcaccctattgtgtctcataggtatggtaaggggttggctgaagaaagtttttgggttgggacaagggattatagtccatatctggtgcttccttcagttatggagttcgttaacaggttcgaaggcggtcttaagggaatcataaaaaggaatcatgatgctgttgttgagatggggaagatgttggcagaagcttggggaaccaatctaggttgtcctcctgatatgtgcgctagcatgatcatggtagggttaccggcttgtttggggatttcaagtgatgatgatgctacgaagttaaggccacatttatgtgataaatttggtgttgaagtcagaatacattatcaagctcccaaagatggagaggttggatcaacgacggggtatgttcgaatttgtcatcagatttacaacaaagttgatgactattacaagctcagagatgcagttaatcaactagttcgtgatggattcacttgcgctcttgagatcaatgaggcctga

SEQ ID NO: 242 - protein, 487 aa, Prunus persica
MTGNAGSSTQENHFRQRLRVMAEKIVIFCRYYVPLIVLLPYRTLQFFYQIKTQVPIEPKHSSSFITDSEIQSEFAHHAPGVAMMNNGSFGCCPASVISALHQWQLKMFRQPSHFLLNELKNRILESRTIIKDHINAEDVDEVSIVDNISTAAAIVLQQTAWAFAEGKFNKGDAVIMFSCTYGAVKNSIEAYFSRAGGSVIEVPFNFPLNSNEEIISEFRKALEREKGNGRRVRLAVIDHVTCVPTVVMPVKQLVKICRDEGVEQVFIDAAHAVGSVDVDMQEIGADFYASTLYKWFFCPPVVSFLYCRKSATHSDLELHHPIVSHRYGKGLAEESFWVGTRDYSPYLVLPSVMEFVNRFEGGLKGIIKRNHDAVVEMGKMLAEAWGTNLGCPPDMCASMIMVGLPACLGISSDDDATKLRPHLCDKFGVEVRIHYQAPKDGEVGSTTGYVRICHQIYNKVDDYYKLRDAVNQLVRDGFTCALEINEA

SEQ ID NO: 243 - DNA, 1356 bp, Populus trichocarpa
atggcttcctcctccttaaaacaccataaaagccactccctcaacggcttcaccacccccgccaagagaacaaaactttctttcatttctgactctgaaatccaatcagaattctcccaccatgaccaaaccatcgctcggatcaacaacggcagctttgggagctgccctcaatctgtcatctcagcccaacaaaacctccagctccagttcctccgccagccagataacttctacttcaacaccctcaaaccttctatacttcattcacgctccttaatcaaatctttggtaaacgctcattctgttgatgaaatctcccttgtagacaacgccaccaccgctgctgctattgtgttacaaaactgtgcatggggtttcaacgaaggaaggtttagcaagggagatgttgctgtcatgttgcattatgcttatggtgctgtcaagaagtctgttcaggcttatgtcacgcgcgctggaggggaagttattgaggtacacttgcccttccctgttgcatcaaaggaggagattgtgagtgaatttagaaaggccttagcgagagggaaagaaaatgggaagaagaaagtcaggttggctgtgattgatcatgttacttcgatgcctagtgttgttattcctgttaaagaattagttaaaatttgtagagaggaaggtgttgaccaggtttttgttgatgctgctcatggaattgggtgtgttgatgttgatgtgagagatattggggctgatttttatactagtaatttgcataagtggtttttttgccctccttctgttgcctttttgtattgcaggaagagaggagaggatggtaaagggggtgatctgcatcaccctgttgtgtctcatgagtatggtaatggattggctgtagagagtgcttggattgggactagggattatagtgctcagttggtggttccggcggttttggagttttttaataggtttgaaggtgggattgagggaattaagaagaggaatcatgagaaagttgtggagatgggggagatgctggtgaaagcttgggggactaatcttgggtctccaccggagatgtgtgggagtatgattatggttggattgcctgcttgtttggggatttcgaatgatctggatactttgaagttaaggtcacacttgagagagcatttccaggttgaagttcctatttattttagggctccagttgatggagaagttgattcaattactggctatgctcgcatttctcatcaagtttacaacaaggctgaggattattacaggtttagggatgcagttaaccaattggtcagtgatggcttcacttgtgcatctctctctaattga

SEQ ID NO: 244 - protein, 451 aa, Populus trichocarpa
MASSSLKHHKSHSLNGFTTPAKRTKLSFISDSEIQSEFSHHDQTIARINNGSFGSCPQSVISAQQNLQLQFLRQPDNFYFNTLKPSILHSRSLIKSLVNAHSVDEISLVDNATTAAAIVLQNCAWGFNEGRFSKGDVAVMLHYAYGAVKKSVQAYVTRAGGEVIEVHLPFPVASKEEIVSEFRKALARGKENGKKKVRLAVIDHVTSMPSVVIPVKELVKICREEGVDQVFVDAAHGIGCVDVDVRDIGADFYTSNLHKWFFCPPSVAFLYCRKRGEDGKGGDLHHPVVSHEYGNGLAVESAWIGTRDYSAQLVVPAVLEFFNRFEGGIEGIKKRNHEKVVEMGEMLVKAWGTNLGSPPEMCGSMIMVGLPACLGISNDLDTLKLRSHLREHFQVEVPIYFRAPVDGEVDSITGYARISHQVYNKAEDYYRFRDAVNQLVSDGFTCASLSN

SEQ ID NO: 245 - DNA, 1362 bp, Populus trichocarpa
atggaaggagccaaagaccctcgaaacggcggcgattcgtcgccaaagcaggtctccaaaaaacctcgcaccagtggccacataacagaacaggaaatccacgaagaattctctcaccataatcttaacgtagccagaattaacaacggtagcttcggtagctgccccggatctgtactcgctgctcaaaaaaactggcagcttcagttccttcaacaacccgacgacttctacttcaatactctccgaaaaggaattctccactcacgtactgtcataaaaaacctcatcaacgctgatgatgtcgatgaaatctccctcgtcgataacgccaccactgcggccgccatcgtccttcaacaaattggccgtgccttcgctgaaggtaagtttgctaaaaacgataccgttttaatgctccactgtgcttacgaagcggttaagaaatccattcaagcttacgtcacgcgtgccgggggttctgttattgaggttcagttaccgtttccggttaattcgaatgaggagataattgcggagtttaagagaggattaggaaaaggcaaagctaacggtagaaagattaggttagcgataattgatcatataacggcgatgccgtgtgttgttattccggttaaggagttggttaaaatttgtagagaagaaggcgtggagcaggtttttgttgatgcagctcatgctattggcagtgttgatataaatgttaaagaaatcggggctgatttttacgttagtaatctgcacaagtggtttttttgtccgccatcagtttcatttctgtattgcaagaaagcgagtttggaatttgatgtgcatcatccggttgtttcacatgagtacggaaatggattgccgattgagagtgcctgggttgggactagggattatagctcgcaattagtggtgccggcggctttggagtttgttaatcggtttgaggatggaattcatgggataatgaagaggaaccatgaggaggttgttaagatggggaaaatgttggcggaatcatggaggacaaatcttggttctccgccggagatgtgtgcaggaatgatcatggttggtttgccttcaagattgagtgtttcaagtgaagatgatgcttcgaggttaaggtcgcacttgcgtgactgtcatggggttgaggttccaatacactatcagggtttaagagatggtgaggagggggtgaaagataaggatggtgttataacagcatatgcaaggatttctcatcagatttataacaagtttgaggattattgcaggtttagggatgctgtaaatcatcttgctgagaatcgacagattcgcagaactatttctccagagtga

SEQ ID NO: 246 - protein, 453 aa, Populus trichocarpa
MEGAKDPRNGGDSSPKQVSKKPRTSGHITEQEIHEEFSHHNLNVARINNGSFGSCPGSVLAAQKNWQLQFLQQPDDFYFNTLRKGILHSRTVIKNLINADDVDEISLVDNATTAAAIVLQQIGRAFAEGKFAKNDTVLMLHCAYEAVKKSIQAYVTRAGGSVIEVQLPFPVNSNEEIIAEFKRGLGKGKANGRKIRLAIIDHITAMPCVVIPVKELVKICREEGVEQVFVDAAHAIGSVDINVKEIGADFYVSNLHKWFFCPPSVSFLYCKKASLEFDVHHPVVSHEYGNGLPIESAWVGTRDYSSQLVVPAALEFVNRFEDGIHGIMKRNHEEVVKMGKMLAESWRTNLGSPPEMCAGMIMVGLPSRLSVSSEDDASRLRSHLRDCHGVEVPIHYQGLRDGEEGVKDKDGVITAYARISHQIYNKFEDYCRFRDAVNHLAENRQIRRTISPE

SEQ ID NO: 247 - DNA, 1461 bp, Sorghum bicolor
atggcgtcggacccggcccctgacgacgcggccgcggcagagaacggccacggcaacgacaacggccacggcaacggcaacggcaacggcaacggcaacggcccgtccccgaagcgggcccggtcggtgatctcggcggacgagatccgcaccgagttcgcgcaccacgacgccgccgtggcgcgcgtcaacaacggcagcttcggctgctgcccggcctcggtcctcgccgcgcaggcccactggcagggcctcttcctcgcgcagcccgacgccttctacttccacggcctccagcagggcctcctccgctcgcgcgccgccgtcgccgaggcggtgggcgccggcgacgtctccgaggtctccctcgtcgacaacgccaccacggctgccgccatcgtcctgcagcacgcggcctggagcttcgccgagggccgcttcgcgagcggggatgccgtgctcatgctccactacgcctacggtgcggtcaagaagtccatccacgcctatgtcgcgcgcgcgggggccaccgtcgtcgaggtgcccctcccgttccctgtcgcgtcggccgacgcgattatcgccgagttccgtgctgcgctcgcggtcgccaaggaaggggggcgtagggtccggctcgcagtcatcgaccacatcacctccatgcccagtgtcgtcatccccgtgaaggagctcgtcgccatctgccgagaagagggcgttgacaaggtattcgttgacgctgcacattctattgggcaggtgcctgtggacgtgcgtgacattggagctgatttctacacaagcaaccttcataagtggttcttttgcccacctgccgtggcatttttgcatactcgcaaggacccgatagcttcccagctccatcaccctgttgtctcgcatgagtatgggaatgggctgcctatggagagcggatggattggaacgagggattacagtgcccagcttgttgtgtctgaggccatagattttgtgaatcggtttgagggtggaatcgaggggatacgaagccggaatcatgagaaagttattgagatgggtatgatgcttgctgaggcttggggcacttttcttggcacacctccggaactgtgtggtagcatggttatggtcgggatgcctggttgccttggtgtcgagagtgatgatgatgcattgagagtgagaactatgttgaggaaggatttccaggtggaggttccaatatactacaactcaagaagggtggaaggacaggagatggcaaaggataggaatggtgatccagtgacaggttatgtgaggatatcacaccaggtttacaatgtcaccaaggactatgagagactcagagatgctgtcaataaacttgtttctgaagggttcaccagcatcaacttgcggccttctgagaagccaggtatcatccacctgaaggcgctgtggccaactacttaa

SEQ ID NO: 248 - protein, 486 aa, Sorghum bicolor
MASDPAPDDAAAAENGHGNDNGHGNGNGNGNGNGPSPKRARSVISADEIRTEFAHHDAAVARVNNGSFGCCPASVLAAQAHWQGLFLAQPDAFYFHGLQQGLLRSRAAVAEAVGAGDVSEVSLVDNATTAAAIVLQHAAWSFAEGRFASGDAVLMLHYAYGAVKKSIHAYVARAGATVVEVPLPFPVASADAIIAEFRAALAVAKEGGRRVRLAVIDHITSMPSVVIPVKELVAICREEGVDKVFVDAAHSIGQVPVDVRDIGADFYTSNLHKWFFCPPAVAFLHTRKDPIASQLHHPVVSHEYGNGLPMESGWIGTRDYSAQLVVSEAIDFVNRFEGGIEGIRSRNHEKVIEMGMMLAEAWGTFLGTPPELCGSMVMVGMPGCLGVESDDDALRVRTMLRKDFQVEVPIYYNSRRVEGQEMAKDRNGDPVTGYVRISHQVYNVTKDYERLRDAVNKLVSEGFTSINLRPSEKPGIIHLKALWPTT

SEQ ID NO: 249 - DNA, 1434 bp, Sorghum bicolor
atggcgtcggacccggcccctgacgacgcggccgcggcagagaacggccacggcaacgacaacggccacggcaacggcaacggcaacggcaacggcaacggcccgtccccgaagcgggcccggtcggtgatctcggcggacgagatccgcaccgagttcgcgcaccacgacgccgccgtggcgcgcgtcaacaacggcagcttcggctgctgcccggcctcggtcctcgccgcgcaggcccactggcagggcctcttcctcgcgcagcccgacgccttctacttccacggcctccagcagggcctcctccgctcgcgcgccgccgtcgccgaggcggtgggcgccggcgacgtctccgaggtctccctcgtcgacaacgccaccacggctgccgccatcgtcctgcagcacgcggcctggagcttcgccgagggccgcttcgcgagcggggatgccgtgctcatgctccactacgcctacggtgcggtcaagaagtccatccacgcctatgtcgcgcgcgcgggggccaccgtcgtcgaggtgcccctcccgttccctgtcgcgtcggccgacgcgattatcgccgagttccgtgctgcgctcgcggtcgccaaggaaggggggcgtagggtccggctcgcagtcatcgaccacatcacctccatgcccagtgtcgtcatccccgtgaaggagctcgtcgccatctgccgagaagagggcgttgacaaggtattcgttgacgctgcacattctattgggcaggtgcctgtggacgtgcgtgacattggagctgatttctacacaagcaaccttcataagtggttcttttgcccacctgccgtggcatttttgcatactcgcaaggacccgatagcttcccagctccatcaccctgttgtctcgcatgagtatgggaatgggctgcctatggagagcggatggattggaacgagggattacagtgcccagcttgttgtgtctgaggccatagattttgtgaatcggtttgagggtggaatcgaggggatacgaagccggaatcatgagaaagttattgagatgggtatgatgcttgctgaggcttggggcacttttcttggcacacctccggaactgtgtggtagcatggttatggtcgggatgcctggttgccttggtgtcgagagtgatgatgatgcattgagagtgagaactatgttgaggaaggatttccaggtggaggttccaatatactacaactcaagaagggtggaaggacaggagatggcaaaggataggaatggtgatccagtgacaggttatgtgaggatatcacaccaggtttacaatgtcaccaaggactatgagagactcagagatgctgtcaataaacttgtttctgaagggttcaccagcatcaacttgcggccttctgagaaggtatcatccacctga

SEQ ID NO: 250 - protein, 477 aa, Sorghum bicolor
MASDPAPDDAAAAENGHGNDNGHGNGNGNGNGNGPSPKRARSVISADEIRTEFAHHDAAVARVNNGSFGCCPASVLAAQAHWQGLFLAQPDAFYFHGLQQGLLRSRAAVAEAVGAGDVSEVSLVDNATTAAAIVLQHAAWSFAEGRFASGDAVLMLHYAYGAVKKSIHAYVARAGATVVEVPLPFPVASADAIIAEFRAALAVAKEGGRRVRLAVIDHITSMPSVVIPVKELVAICREEGVDKVFVDAAHSIGQVPVDVRDIGADFYTSNLHKWFFCPPAVAFLHTRKDPIASQLHHPVVSHEYGNGLPMESGWIGTRDYSAQLVVSEAIDFVNRFEGGIEGIRSRNHEKVIEMGMMLAEAWGTFLGTPPELCGSMVMVGMPGCLGVESDDDALRVRTMLRKDFQVEVPIYYNSRRVEGQEMAKDRNGDPVTGYVRISHQVYNVTKDYERLRDAVNKLVSEGFTSINLRPSEKVSST

SEQ ID NO: 251 - DNA, 1431 bp, Sorghum bicolor
atggcgtcggacccggcccctgacgacgcggccgcggcagagaacggccacggcaacgacaacggccacggcaacggcaacggcaacggcaacggcaacggcccgtccccgaagcgggcccggtcggtgatctcggcggacgagatccgcaccgagttcgcgcaccacgacgccgccgtggcgcgcgtcaacaacggcagcttcggctgctgcccggcctcggtcctcgccgcgcaggcccactggcagggcctcttcctcgcgcagcccgacgccttctacttccacggcctccagcagggcctcctccgctcgcgcgccgccgtcgccgaggcggtgggcgccggcgacgtctccgaggtctccctcgtcgacaacgccaccacggctgccgccatcgtcctgcagcacgcggcctggagcttcgccgagggccgcttcgcgagcggggatgccgtgctcatgctccactacgcctacggtgcggtcaagaagtccatccacgcctatgtcgcgcgcgcgggggccaccgtcgtcgaggtgcccctcccgttccctgtcgcgtcggccgacgcgattatcgccgagttccgtgctgcgctcgcggtcgccaaggaaggggggcgtagggtccggctcgcagtcatcgaccacatcacctccatgcccagtgtcgtcatccccgtgaaggagctcgtcgccatctgccgagaagagggcgttgacaaggtattcgttgacgctgcacattctattgggcaggtgcctgtggacgtgcgtgacattggagctgatttctacacaagcaaccttcataagtggttcttttgcccacctgccgtggcatttttgcatactcgcaaggacccgatagcttcccagctccatcaccctgttgtctcgcatgagtatgggaatgggctgcctatggagagcggatggattggaacgagggattacagtgcccagcttgttgtgtctgaggccatagattttgtgaatcggtttgagggtggaatcgaggggatacgaagccggaatcatgagaaagttattgagatgggtatgatgcttgctgaggcttggggcacttttcttggcacacctccggaactgtgtggtagcatggttatggtcgggatgcctggttgccttggtgtcgagagtgatgatgatgcattgagagtgagaactatgttgaggaaggatttccaggtggaggttccaatatactacaactcaagaagggtggaaggacaggagatggcaaaggataggaatggtgatccagtgacaggttatgtgaggatatcacaccaggtttacaatgtcaccaaggactatgagagactcagagatgctgtcaataaacttgtttctgaagggttcaccagcatcaacttgcggccttctgagaagcaagaggcttag

SEQ ID NO: 252 - protein, 476 aa, Sorghum bicolor
MASDPAPDDAAAAENGHGNDNGHGNGNGNGNGNGPSPKRARSVISADEIRTEFAHHDAAVARVNNGSFGCCPASVLAAQAHWQGLFLAQPDAFYFHGLQQGLLRSRAAVAEAVGAGDVSEVSLVDNATTAAAIVLQHAAWSFAEGRFASGDAVLMLHYAYGAVKKSIHAYVARAGATVVEVPLPFPVASADAIIAEFRAALAVAKEGGRRVRLAVIDHITSMPSVVIPVKELVAICREEGVDKVFVDAAHSIGQVPVDVRDIGADFYTSNLHKWFFCPPAVAFLHTRKDPIASQLHHPVVSHEYGNGLPMESGWIGTRDYSAQLVVSEAIDFVNRFEGGIEGIRSRNHEKVIEMGMMLAEAWGTFLGTPPELCGSMVMVGMPGCLGVESDDDALRVRTMLRKDFQVEVPIYYNSRRVEGQEMAKDRNGDPVTGYVRISHQVYNVTKDYERLRDAVNKLVSEGFTSINLRPSEKQEA

SEQ ID NO: 253 - DNA, 1386 bp, Sorghum bicolor
atggcctcggctccgcacggcgacgctgccgaggtcaggaacgccgcgccgccggcaaagcgcgccagcgcaccgatcacggaagccgatatccgcgccgagttcgcccaccacgacggcagcgtggcccgcgtcaacaacggcaccttcgggtgctgcccggcctcggtcctcgcggcgcgggcgcggtggcagcggctgttcctctcgcagcccgacgcgttctacttcgactccctgcagccggggctcgcccgctcgcgtgccgcggtagcggctgccgtcggggcgtgtgacgcctccgaggtctccctcgtcgacaacgctaccacggcggcggccatcatcatgcagcacgtggcctggagcttcgcggagggcgtcttcgcgcgcggcgacgtggtgctgatgctccactacacctacagctccgtcaagaactccatccacgcgtacgtggtccgcgcgggggccaccgtcgtcgaggtgccgctcccgttccccgtcgcctcgccgggcgccgtcgtcgccgagttccgcaccgcgctcgcgctcgccaaggccgggggccgcagcgtccgcctcgccgtcatcgaccacatcacctccatgcccagcgtcctcctccccgtgaaggagctcgtcgccatctgccgcgaggagggcgtggacaaggtcttcgtcgacggcgcgcacgccatcggccaggtgcccatcgacgtgcgcgacatcggcgccgacttctacaccagcaacctccacaagtggttcttctgcccttccgccgtggcgttcctgcacatccgcaaggatgaccccgtagccaagcagctccaccaccccgtcgtgtctagcgagtacggcaacgggctgcccatggagagcgcctggattggggtgcgggattacagtgcccagctcgttgtgcctgatgccgttgacttcatgagccggttcgagggcggcgtcgaggcgataagcagacggaaccatgacaaggtgatcgagatgggcacgatgctcgccgaggcatgggggacgtttcttggctcgccgccggaaatgtgcggaagcatggctatggtcgggctgcctggttgccttgccattgagagcggtggtgatgcgatgagagtaagggacatgctgaggaacgaattcaaggtcgaggtgccaatattccacaactcaagaagtgttgaagaaggtcaagagttggccaaggatgccaagggcgatcaagtcagtgggtatgtgagaatttcacatcaggtttacaatgtcagggaggagtatgagaccctgagagatgctgtccataagcttgttcttgatggtttctcctgcagcaagatgagaccttctgggaaggctctctctaactga

SEQ ID NO: 254 - protein, 461 aa, Sorghum bicolor
MASAPHGDAAEVRNAAPPAKRASAPITEADIRAEFAHHDGSVARVNNGTFGCCPASVLAARARWQRLFLSQPDAFYFDSLQPGLARSRAAVAAAVGACDASEVSLVDNATTAAAIIMQHVAWSFAEGVFARGDVVLMLHYTYSSVKNSIHAYVVRAGATVVEVPLPFPVASPGAVVAEFRTALALAKAGGRSVRLAVIDHITSMPSVLLPVKELVAICREEGVDKVFVDGAHAIGQVPIDVRDIGADFYTSNLHKWFFCPSAVAFLHIRKDDPVAKQLHHPVVSSEYGNGLPMESAWIGVRDYSAQLVVPDAVDFMSRFEGGVEAISRRNHDKVIEMGTMLAEAWGTFLGSPPEMCGSMAMVGLPGCLAIESGGDAMRVRDMLRNEFKVEVPIFHNSRSVEEGQELAKDAKGDQVSGYVRISHQVYNVREEYETLRDAVHKLVLDGFSCSKMRPSGKALSN

SEQ ID NO: 255 - DNA, 1365 bp, Solanum lycopersicum
atggaaccggcgaacgacgatgaccaccgagctaatggctccgaccacagtcatttggctaagaaacctaagctgtccaccagatcgtcttctctcattacggattccgaaatacgtgaagagttcgcccatcatcagaccgggatagctcgtatcaataatggcagcttcggtagctgtccggcatccatcatcgcagctcagaagcgttggcagctccgttttctacagcaacccgatgacttcttccttaaccatcttcagaagcggattctacattcacggactattatcaaggatgttattaatgcggagcacgtggatgaggtatctcttgtggataacgctactactgccgctgctatcgttcttcaacatgttggatgggctttcgcggagggacggtttaagaaaggagatgctgtagtcatgctccattgtgcgtttcaggctgttaagaaatcgattgaagcttatgtcacccgggctggtggttctgtgatcgttgttcatttgccctttcctcttcgttcggaggaagagattgttgcggagtttcggaaagccttggctaaggggaaagcgaatggaaagaaggttcggttggctatcattgatcacattacatcaatgccgtgtgttgtcatacctgtgcgtgatttggttaagatttgtagggaagaaggtgttgaacgagtatttgtcgatgctgcccatgccattggcagtgttcctgtcgatgttaaagaaattggagctgatttttatgtaagcaacttgcacaagtggtttttctgtcctccatcggttgcctttttgtattgtcggaaatcacctgtatcacctgatctacaccatcctgtggtgtcgcatgaatatggtaatggactagccattgaaagtgcatggatagggacgagagactacagctctcagctagttatacctgaggtgttagaatttataaataggtttgagggtgggattgagggaattaggttgaggaatcataaggctgtgattgaaatgggacaaatgttggccaatgcttggggaacatcgcttggctgcccccctgacatgtctccaggtatggcaatggttggtttgcctgttaaccttaagattctcagcgataaggatgctttaaatttgagaaatcatttgcgtgaccattttgcggtggaagtcccaattcactacgaggaaataaaggaattacaggatggtgatggctacgtgacaggatatgctcggatttctcatcaggtttacaataaggttgatgactatataaagttgaaggatgcaattcttcagcttgtgcgagacggagtaacttgtaagatgcttcactcagaataa

SEQ ID NO: 256 - protein, 454 aa, Solanum lycopersicum
MEPANDDDHRANGSDHSHLAKKPKLSTRSSSLITDSEIREEFAHHQTGIARINNGSFGSCPASIIAAQKRWQLRFLQQPDDFFLNHLQKRILHSRTIIKDVINAEHVDEVSLVDNATTAAAIVLQHVGWAFAEGRFKKGDAVVMLHCAFQAVKKSIEAYVTRAGGSVIVVHLPFPLRSEEEIVAEFRKALAKGKANGKKVRLAIIDHITSMPCVVIPVRDLVKICREEGVERVFVDAAHAIGSVPVDVKEIGADFYVSNLHKWFFCPPSVAFLYCRKSPVSPDLHHPVVSHEYGNGLAIESAWIGTRDYSSQLVIPEVLEFINRFEGGIEGIRLRNHKAVIEMGQMLANAWGTSLGCPPDMSPGMAMVGLPVNLKILSDKDALNLRNHLRDHFAVEVPIHYEEIKELQDGDGYVTGYARISHQVYNKVDDYIKLKDAILQLVRDGVTCKMLHSE

SEQ ID NO: 257 - DNA, 1266 bp, Selaginella moellendorffii
atgccgattgtggaatccggcaagatctgggaggagatgctggctcgcgaattctcgcaccacaggcaaggaatcgcgagaatcaacaatgggagctttgggagctgtcctcgatcggtcctggaggcgcagcagcggtggcacaggcagtggctggagcagccggacgagttctacttcggccccctggagaagggattgcgcgcgtcgcgggaggcgatcgcgtccatcatccgcgcccccgacgtggaggagatcgtcctggtggacaacgtgaccacggcggcggcgatgatcgcccaggacatggcgtggggattcctggagaagagattccaccccggcgacgccatcctcatgctcaactgcagctatgccgccgtgaagaagtgcttcgaggcctacgctgttcgcgcaggcgcgaggatcatcgaggtggagctcgcgcttccaattctctccgcccggcagatcatcgacagcttccagcgatcgctggagcaggccgccaagagctccaccaccatccggctggcggtgatcgaccacatcacctcgatgccatcggtggttctcccggcgcgagatctcgtcgccctttgccgcgacgctggagtggagcagatcttcgtggatggcgctcacgcgatcggcaacatcgagctgagcatggaggagatcgacgccgactactactcgagcaatctccacaagtggctcttcgctccacacagcgtcgcgttcctccacgccaaggccaagcatctggagcgcctccaccacccggtggtgtctcacaacttcaagctggggctcttcagcgagtgttcttgggtggggacgagagactacagctcccagctcgccgtgaccgccgcggtggagttcatcgatgggaatctaggtggcctctccagtctcatcgctttcaatcaccggggggcgatggcgatggcggagatgctcgcggcggcgtgggggacgcagtgtgggacgtgtgccgagcttgcttcgtccatggcgatggtggagctcccggcgaagctggaagtggcgagcgaggaggcggcgctggagatgaggacgaggctgcgcagggagtttggagtggaggtcccgatttgcttccaggcggggggatcgcccagcgcgaattcgaagagcatgagatccgggacggcgtacgcgagagtttctcaccagatttacaacaagctcgaggactacacgaggctgcgagacgctgtgaaatccttggctcgctag

SEQ ID NO: 258 - protein, 421 aa, Selaginella moellendorffii
MPIVESGKIWEEMLAREFSHHRQGIARINNGSFGSCPRSVLEAQQRWHRQWLEQPDEFYFGPLEKGLRASREAIASIIRAPDVEEIVLVDNVTTAAAMIAQDMAWGFLEKRFHPGDAILMLNCSYAAVKKCFEAYAVRAGARIIEVELALPILSARQIIDSFQRSLEQAAKSSTTIRLAVIDHITSMPSVVLPARDLVALCRDAGVEQIFVDGAHAIGNIELSMEEIDADYYSSNLHKWLFAPHSVAFLHAKAKHLERLHHPVVSHNFKLGLFSECSWVGTRDYSSQLAVTAAVEFIDGNLGGLSSLIAFNHRGAMAMAEMLAAAWGTQCGTCAELASSMAMVELPAKLEVASEEAALEMRTRLRREFGVEVPICFQAGGSPSANSKSMRSGTAYARVSHQIYNKLEDYTRLRDAVKSLAR

SEQ ID NO: 259 - DNA, 1239 bp, Selaginella moellendorffii
atgactgtgtcgatgcaaggccaagaggccgggagtatccagagaatgccgattgtaggatccggcaagatctgggaggagatgctggctcgcgaattctcgcatcacaggcaaggaatcgcgagaatcaacaatgggagctttgggagctgtcctcgatcggtcctggaggcgcagcagcgatggcacaggcagtggctggagcagccggacgagttctacttcggccccctggagaagagattgcgcgcgtcgcgggaggcgatcgcgtcgatcatccgcgcccccaacgtggaggagatcgtcctggtggacaacgtgacgacggcggcggcgatgatcgcccaggacatggcgtggggattcctggagaagagattccaccccggcgacgccatcctcatgctcaattgcagctatgccgccgtgaagaagtgcttcgaggcctacgctgttcgcgccggcgcgaggatcatcgaggtggagctcgcgcttccaatcctctccgcccggcagatcatcgacagcttccagcgatcgctggagcaggccgccaagagctccaccaccatccggctggcggtgatcgaccacatcacctcgatgccatcggtggttctcccggcgcgagatctcgtcgccctttgccgcgacgctggagtggagcagatcttcgtggacggagctcacgcgatcggcaacatcgagctgagcgtggaggagatcgacgccgactactactcgagcaatctccacaagtggctcttcgctccacatagcgtcgcgttcctccacgccaaggccaagcacctggagcgcctccaccacccggtggtgtctcacaacttcaagctggggctcttcagcgagtgttcttgggtggggacgagagactacacctcccagctcgctgtgaccgccgcggtggagttcatcgatgggaatctaggtggcctctccagtctcatcgctttcaatcaccgccgggcgatggcgatggcggagatgctcgcggcggcgtgggggacgcagtgtgggacgtgtgccgagcttgcgcagggagtttggagtggaggtgccgatttgcttccaggcggggggatcgcccagcgcgaattcgaagagcaagagatccgggacggcggatggagctcggaaaatgcaatggatttctgccgatcgagtcgcattccgtggagatcggcgcaatgctgctcgagcactgtggtgaatctttga

SEQ ID NO: 260 - protein, 412 aa, Selaginella moellendorffii
MTVSMQGQEAGSIQRMPIVGSGKIWEEMLAREFSHHRQGIARINNGSFGSCPRSVLEAQQRWHRQWLEQPDEFYFGPLEKRLRASREAIASIIRAPNVEEIVLVDNVTTAAAMIAQDMAWGFLEKRFHPGDAILMLNCSYAAVKKCFEAYAVRAGARIIEVELALPILSARQIIDSFQRSLEQAAKSSTTIRLAVIDHITSMPSVVLPARDLVALCRDAGVEQIFVDGAHAIGNIELSVEEIDADYYSSNLHKWLFAPHSVAFLHAKAKHLERLHHPVVSHNFKLGLFSECSWVGTRDYTSQLAVTAAVEFIDGNLGGLSSLIAFNHRRAMAMAEMLAAAWGTQCGTCAELAQGVWSGGADLLPGGGIAQREFEEQEIRDGGWSSENAMDFCRSSRIPWRSAQCCSSTVVNL

SEQ ID NO: 261 - DNA, 1365 bp, Solanum tuberosum
atggaaccggcgaacgacgatgaccaccgagctaatggctccgaccacagccatttggctaagaaacctaagctgtccaccagctcgtcttctctcattacggattccgaaatacgtgaagagttctcccatcatcagcccgggatagctcgtatcaataacggcagcttcggtagctgcccggcgtccatcatcgcagctcagaagcattggcagctccgttttctacagcaacccgatgacttcttccttaaccatcttcagaagcggattcttcattcacggactattatcaaggatgttattaatgcggagcacgtggatgaggtatctcttgtggataacgctactactgctgctgcaatcgttcttcaacatgttggatgggctttcgcggagggacgtttcaagaagggagatgctgtggtcatgctccattgtgcgtttcaggctgttaagaaatcgattgaggcttatgtcacccgtgctggtggttctgtgatcgttgttcatttgccgtttcctcttcgttcggaggaagagattgttgcggagtttcggaaagcgttggctaaggggaaagcgaatggaaagaaggttcggttggctatcattgatcacattacatcaatgccgtgtgttgtcatacctgtgcgtgatttggttaagatttgtagggaagaaggtgttgaacgggtgtttgtcgatgctgcccatgccattggcagtgttcctgtcgatgttaaagaaattggagctgatttttatgtaagcaacttgcacaagtggtttttctgtcctccttcggttgcctttttgtattgtcggaaatcacctgtatcacctgatctacaccatcctgtggtgtctcatgaatatggtaatggtctagccattgaaagtgcatggatagggacgagagactacagctctcagctagttatacctgaggtgttagaatttataaataggtttgaaggtgggattgagggaataaggttgaggaatcataaggctgtgattgaaatgggacaaatgttggccaatgcttggggaacatcgcttggctgccctcctgacatgtctccaggtatggcaatggttggtttgcctgttaaccttaggattctcagcgataaggatgctttaactttgagaaatcatttgcgtgaccattttggggtggaagtcccaattcactacgaggaaataaaggaattacaggatggtgatggctacgtgacaggatatgctcggatttctcatcaggtttacaataaggttgatgactatataaagttgaaggatgcaattcttcagcttgtgcgagacggagttacttgtaagatgcttccctcagaataa

SEQ ID NO: 262 - protein, 454 aa, Solanum tuberosum
MEPANDDDHRANGSDHSHLAKKPKLSTSSSSLITDSEIREEFSHHQPGIARINNGSFGSCPASIIAAQKHWQLRFLQQPDDFFLNHLQKRILHSRTIIKDVINAEHVDEVSLVDNATTAAAIVLQHVGWAFAEGRFKKGDAVVMLHCAFQAVKKSIEAYVTRAGGSVIVVHLPFPLRSEEEIVAEFRKALAKGKANGKKVRLAIIDHITSMPCVVIPVRDLVKICREEGVERVFVDAAHAIGSVPVDVKEIGADFYVSNLHKWFFCPPSVAFLYCRKSPVSPDLHHPVVSHEYGNGLAIESAWIGTRDYSSQLVIPEVLEFINRFEGGIEGIRLRNHKAVIEMGQMLANAWGTSLGCPPDMSPGMAMVGLPVNLRILSDKDALTLRNHLRDHFGVEVPIHYEEIKELQDGDGYVTGYARISHQVYNKVDDYIKLKDAILQLVRDGVTCKMLPSE

SEQ ID NO: 263 - DNA, 1407 bp, Triticum aestivum
atggcgtcgatcccgtctgacgaggtctccgagaacggccacggcaacggaaacggcccatccccgccgcgcgccaagcgcccccgcgcagcgttgatctcggccgcccagatccgcgacgagttcgcgcatcacgaccccgcagttgcccgcgtcaacaacggcagcttcggctgctgcccggcctccgtgctcgaagcgcaggcgcgctggcagcgcctcttcctcgctcagcccgacgccttctacttcgacggccttcagccggggctccgccgctcccgcgcagccgtcgcggcccttgtcaacgctggggacgtctccgagatttccctcgtcgacaacgctaccaccgctgctgcaatcgtgctgcagcatgccgcctggagctttgccgaggggcacttcgctcgtggcgacgctgtgctcatgctccattacgcctacggagcagtaaagaaatctatccaggcctacgttgcccgcgcgggcgccactgtcgtcgaggtacccctcccgttcccggtcacctcccctgacgccattattgcggagttccatgctgcgctcgctgttgccaaggccggtggtcgtaaggtccggcttgctgtcattgatcacatcacctccatgcccagtgttctcattccagtcaaggagctagttgccatttgtcgccaagagggcgtcgacaaagtttttgttgatgctgcacactctgttgggcaagtccctgtctctgtgcgagacattggggcggatttctacactagcaacctccacaagtggttcttttgccccccggccgtggctttcttacacacccgcaagggtggcccgataacctctcagctccaccaccctgttgtgtcacatgaatatggcaacgggctacctatggagagtggatggattgggacacgggattacagtgcccagatcgtcgttcctgaagctattcactttgtgaaccgatttgaaggtgggattgaggggatacgcagccggaaccatgagaaggtaattgagatggggaggatgcttgccgaagcatgggggacagttcttggatcaccaccagtaatgtgtggaagcatggctatggtagggatgcctagttgtctttgcattgagagtgacgatgatgcactgagagtgcggaccatgttgaggaaggatttcaaagttgaggtgcctatatactacaatagcagacaggttaaagtgcaagagatggcaaaggataatagtagtgatccagtgacggggtatgtaagaatctcacaccaggtttacaatgtcaaggaggagtatgagaggctgagagatgctgtcaataagcttgttgctgaggggttcaccagtgccgaattgaggccagctgagaagcaagaagctctggcttga

SEQ ID NO: 264 - protein, 468 aa, Triticum aestivum
MASIPSDEVSENGHGNGNGPSPPRAKRPRAALISAAQIRDEFAHHDPAVARVNNGSFGCCPASVLEAQARWQRLFLAQPDAFYFDGLQPGLRRSRAAVAALVNAGDVSEISLVDNATTAAAIVLQHAAWSFAEGHFARGDAVLMLHYAYGAVKKSIQAYVARAGATVVEVPLPFPVTSPDAIIAEFHAALAVAKAGGRKVRLAVIDHITSMPSVLIPVKELVAICRQEGVDKVFVDAAHSVGQVPVSVRDIGADFYTSNLHKWFFCPPAVAFLHTRKGGPITSQLHHPVVSHEYGNGLPMESGWIGTRDYSAQIVVPEAIHFVNRFEGGIEGIRSRNHEKVIEMGRMLAEAWGTVLGSPPVMCGSMAMVGMPSCLCIESDDDALRVRTMLRKDFKVEVPIYYNSRQVKVQEMAKDNSSDPVTGYVRISHQVYNVKEEYERLRDAVNKLVAEGFTSAELRPAEKQEALA

SEQ ID NO: 265 - DNA, 1338 bp, Vitis vinifera
atggattccgaccgcggagagaacggcgactcctctcacaaccacgtttccaagaagccaaagctctctgctttcatatccgaagaggaaatccgacaagagttctctcatcaccagcgtggaatcgcgcgaatcaacaacggtagtttcggaagctgccccgcttccataatcgccgctcagaaggagtggcagctccgatttcttcaacagcctgatgatttctacttcaatcacctccggaagggcttgctcgaatccagaactgttgtaaagggcctcatcaatgctgactccgtcgacgaagtttccctcatcgacaacgctaccacggccgccgctatcgtgctccaacagatcggccgcgccttcgcccaaggtaaatttcaaaaaggcgatgtcgttgtcatgctccactgcgctttccagtcggtgaagaagtcgattcaggcctatgttactggagccggtggctccgtcatcgaagtccaattgccatttccattgacgtcgaaagaggaaatcgtttctgagtttaggaaaggtttagagaaaggtaaatccgatggtaggcatgttaggttagctataattgatcatataacatcaatgccgtgcgttgtggtgcccgtagaggaattggttaagatttgtaggcaggaaggggtcgaccaggtgtttgtagatgcagctcatgctattggtagtgttcctgttgatgttaaagaaattggggctgatttctacgttagtaatttgcataagtggttcttttgcccgccttcagttgcatttttgtattgtagaaaatcgcctttatcatctgaagtgcaccatccggtggtttcccatgaatttggaaatggattggctatagaaagttcatggatagggacaagggattacagttcacagcttgttgttccttcagttttggagtttgtgaataggttcgaaggtggtattgagggtattatgatgaggaatcatgaaattgttgttaaaatgggagaaatgcttgctaagtcctggggaacaaatcttggggcacctccggaaatgtgtgctagcatgattatggttggtttgccttctagattgtttatttccagtgaggaagatgctatgagattgaggtcgtatttgcgtcagcatcatggtattgaagttcccttacattatcaggctccctcagatgataaggatggtcttgtaacaggttatgctaggatttctcatcaagtttataacagttttgacgattattgcaagtttagggatgcaattaatcaacttgttgagcagcgacggagttgcaaaatgctttttatggaataa

SEQ ID NO: 266 - protein, 445 aa, Vitis vinifera
MDSDRGENGDSSHNHVSKKPKLSAFISEEEIRQEFSHHQRGIARINNGSFGSCPASIIAAQKEWQLRFLQQPDDFYFNHLRKGLLESRTVVKGLINADSVDEVSLIDNATTAAAIVLQQIGRAFAQGKFQKGDVVVMLHCAFQSVKKSIQAYVTGAGGSVIEVQLPFPLTSKEEIVSEFRKGLEKGKSDGRHVRLAIIDHITSMPCVVVPVEELVKICRQEGVDQVFVDAAHAIGSVPVDVKEIGADFYVSNLHKWFFCPPSVAFLYCRKSPLSSEVHHPVVSHEFGNGLAIESSWIGTRDYSSQLVVPSVLEFVNRFEGGIEGIMMRNHEIVVKMGEMLAKSWGTNLGAPPEMCASMIMVGLPSRLFISSEEDAMRLRSYLRQHHGIEVPLHYQAPSDDKDGLVTGYARISHQVYNSFDDYCKFRDAINQLVEQRRSCKMLFME

SEQ ID NO: 267 - DNA, 1416 bp, Zea mays
atggcgtcggacccggcccctgacgacgcggccgcggccgtgaatgggcacggcaacgacaacggacacggtaacggcccgtccccgtcgaagcgcccccgggcggtgatctcggaagccgagatccgcgtcgagttcgcacaccacgacgcagccgtggcgcgcgtcaacaacggcagcttcggctgctgcccggcctcggtcctcgccgcgcaggcccactggcagcgcctcttcctcgcgcagcccgacgccttctacttccacgttctccagcagggccttctccgctcgcgcgccgccgtcgccgaggtggtgggcgctggcgacgtctccgaggtctccctcgtcgataacgccaccacggccgccgccatcgtcctgcagcacgcagcctggagcttcgccgagggtcacttcgcgcgcggggatgcggtgctgatgctccactacgcctatggtgcggtcaagaagtccatccacgcgtacgtcgcgcgtgcgggggccaccgtcgtcgaggtgcccctcccattccccgtcgcgtccgccgacgcaatcattgccgagttccgtgctgcgctcgcggtcgccaaggaaggagggcgtagggtcaggctcgcagtcatcgaccacattacctccatgcccagtgtcgtcatcccagtcaaggagctcgtcgccatctgtcgagaagagggcgttgacaaggtatttgttgacgctgcccactctattgggcaggtgcctgtggacgtgcgcgacattggagccgatttctatacaagcaaccttcataagtggttcttttgcccccctgctgtggcctttttgcatactcgcaaggatgacccgatagcctcccaactccatcaccctgttgtttcccatgagtatgggaatgggctgcctatggagagcggatggattggaacacgggattacagtgcccagcttgttgtgtccgaggctatagattttgtgaatcgatttgagggtggaattgaggctatacgaaaccggaatcatgagaaagttattgagatgggtaggatgcttgctgaggcatgggggacttttcttggctcacctccggaactgtgtggtagcatggttatggtggggatgcctggttgccttggtgttgagagtgatgatgatgcaatgagagtgaggacaatgttgaggccactggtgaggacttctctgttgagccagctgatgagaggaggccatcccgtgctctcttggatgttggccttatcaggactacaacagggaaccgtgtctttggtgccctcaaggtatatatcttatgtctgttaccatgatattatattggtgtcattgtttgtatttagcccatcgagaataatcattatttcatgggcttgctgtatgagtcatctcttgtggtga

SEQ ID NO: 268 - protein, 471 aa, Zea mays
MASDPAPDDAAAAVNGHGNDNGHGNGPSPSKRPRAVISEAEIRVEFAHHDAAVARVNNGSFGCCPASVLAAQAHWQRLFLAQPDAFYFHVLQQGLLRSRAAVAEVVGAGDVSEVSLVDNATTAAAIVLQHAAWSFAEGHFARGDAVLMLHYAYGAVKKSIHAYVARAGATVVEVPLPFPVASADAIIAEFRAALAVAKEGGRRVRLAVIDHITSMPSVVIPVKELVAICREEGVDKVFVDAAHSIGQVPVDVRDIGADFYTSNLHKWFFCPPAVAFLHTRKDDPIASQLHHPVVSHEYGNGLPMESGWIGTRDYSAQLVVSEAIDFVNRFEGGIEAIRNRNHEKVIEMGRMLAEAWGTFLGSPPELCGSMVMVGMPGCLGVESDDDAMRVRTMLRPLVRTSLLSQLMRGGHPVLSWMLALSGLQQGTVSLVPSRYISYVCYHDIILVSLFVFSPSRIIIISWACCMSHLLW

SEQ ID NO: 269 - DNA, 1377 bp, Zea mays
atggcctcggctccgcacgacgacgcggccaagggcaggaacgctgcgccgccggaaaaacgcaccagcgcaactatcacggaagccgatattcgcgccgagttcgcgcaccacgacggcaccgtagcccgcgtcaacaacggcaccttcggctgctgcccggcgtcggtcctcgcggcgagggcgcggtggcaacggctttttctctctcagcccgacgcgttctacttcgactctctccagccggggctcgcccgctcgcgtgccgccgtggcgtccgccgtcggggcgggtgacgcctccgaggtctccctcgtcgacaacgctaccacggccgcggccatcatcatgcagcacgtggcctggagcttcgcggagggcgccttcgcacgcggcgacgtggtgctcatgctccactacacctacagctccgtcaagaagtccatccacgcgtacgtggtccgcgcgggggccaccgtcgtcgaggtgccgctcccgttccccgtcgcctcggcggtcgccgtcgtcgccgagttccgtgccgcgctcgcgctcgcccaggctgggggccgcagagtccgcctcgccgtcatcgaccacatcacctcgatgcccagcgtcctcctccccgtgaaggagctcgtcgccatctgccgcgaggagggcgtggacaaggtcttcgtcgacggggcgcacgccatcggccaggtgcccatcgacgtgcgcgacatcggcgccgacttctacaccagcaacctccacaagtggttcttctgcccttccgccgtggccttcctgcacatccgcaaggatgaccccgtagcctcgcagctccaccaccccgtcgtgtctagcgagtacggcaacgggctgcccatggagagcgcctggatcggggtgcgggattacagtgcccagctcgttgtgcctgatgccgttgacttcatgagacggttcgagggcggcatcgagacgataagcaaacggaaccatgagaaggtgatcgagatgggcacgatgctcgccgaggcttgggggacgtttcttggctcgccgccggaaatgtgcggaagcatggctatggtcgggctgccaggttgccttggcattgagagcgatgatgatgcgatgagagtgagggacatgctgaggaacgaattcaaggtcgaggtgccaatattcaacaactcaagaagtgttgaggaaggacaagagatggccaagggcgatcaagtgacagggtacgtgagaatctcacatcaggtttacaatgtcacggaggagtatgaggtcttgagagatgccgtaggcaagcttgttcttgatggtttctcctgcaccaagctgagaccttctgagaaggttatttctaactga

SEQ ID NO: 270 - protein, 458 aa, Zea mays
MASAPHDDAAKGRNAAPPEKRTSATITEADIRAEFAHHDGTVARVNNGTFGCCPASVLAARARWQRLFLSQPDAFYFDSLQPGLARSRAAVASAVGAGDASEVSLVDNATTAAAIIMQHVAWSFAEGAFARGDVVLMLHYTYSSVKKSIHAYVVRAGATVVEVPLPFPVASAVAVVAEFRAALALAQAGGRRVRLAVIDHITSMPSVLLPVKELVAICREEGVDKVFVDGAHAIGQVPIDVRDIGADFYTSNLHKWFFCPSAVAFLHIRKDDPVASQLHHPVVSSEYGNGLPMESAWIGVRDYSAQLVVPDAVDFMRRFEGGIETISKRNHEKVIEMGTMLAEAWGTFLGSPPEMCGSMAMVGLPGCLGIESDDDAMRVRDMLRNEFKVEVPIFNNSRSVEEGQEMAKGDQVTGYVRISHQVYNVTEEYEVLRDAVGKLVLDGFSCTKLRPSEKVISN

SEQ ID NO: 271 - DNA, 1413 bp, Zea mays
atggcgtcggacccggcccctgacgacgcggccgcggccgtgaatgggcacggcaacgacaacggacacggtaacggcccgtccccgtcgaagcgcccccgggcggtgatctcggaagccgagatccgcgtcgagttcgcacaccacgacgcagccgtggcgcgcgtcaacaacggcagcttcggctgctgcccggcctcggtcctcgccgcgcaggcccactggcagcgcctcttcctcgcgcagcccgacgccttctacttccacgttctccagcagggccttctccgctcgcgcgccgccgtcgccgaggtggtgggcgctggcgacgtctccgaggtctccctcgtcgataacgccaccacggccgccgccatcgtcctgcagcacgcagcctggagcttcgccgagggtcacttcgcgcgcggggatgcggtgctgatgctccactacgcctatggtgcggtcaagaagtccatccacgcgtacgtcgcgcgtgcgggggccaccgtcgtcgaggtgcccctcccattccccgtcgcgtccgccgacgcaatcattgccgagttccgtgctgcgctcgcggtcgccaaggaaggagggcgtagggtcaggctcgcagtcatcgaccacattacctccatgcccagtgtcgtcatcccagtcaaggagctcgtcgccatctgtcgagaagagggcgttgacaaggtatttgttgacgctgcccactctattgggcaggtgcctgtggacgtgcgcgacattggagccgatttctatacaagcaaccttcataagtggttcttttgcccccctgctgtggcctttttgcatactcgcaaggatgacccgatagcctcccaactccatcaccctgttgtttcccatgagtatgggaatgggctgcctatggagagcggatggattggaacacgggattacagtgcccagcttgttgtgtccgaggctatagattttgtgaatcgatttgagggtggaattgaggctatacgaaaccggaatcatgagaaagttattgagatgggtaggatgcttgctgaggcatgggggacttttcttggctcacctccggaactgtgtggtagcatggttatggtggggatgcctggttgccttggtgttgagagtgatgatgatgcaatgagagtgaggacaatgttgagaaaggatttccaggtggaggtgccggtatactacaactcaagaagggtggaaggacaggagatgacaaaggataaaaatggtgatccagtgacagggtatgtgaggatctcacaccaggtttacaatgtcacagaggactatgagagactgagggatgttgtcaataaacttgtttctgaagggttcaccagcagcaagttgcggccttctgagaagcaagaagcttag

SEQ ID NO: 272 - protein, 470 aa, Zea mays
MASDPAPDDAAAAVNGHGNDNGHGNGPSPSKRPRAVISEAEIRVEFAHHDAAVARVNNGSFGCCPASVLAAQAHWQRLFLAQPDAFYFHVLQQGLLRSRAAVAEVVGAGDVSEVSLVDNATTAAAIVLQHAAWSFAEGHFARGDAVLMLHYAYGAVKKSIHAYVARAGATVVEVPLPFPVASADAIIAEFRAALAVAKEGGRRVRLAVIDHITSMPSVVIPVKELVAICREEGVDKVFVDAAHSIGQVPVDVRDIGADFYTSNLHKWFFCPPAVAFLHTRKDDPIASQLHHPVVSHEYGNGLPMESGWIGTRDYSAQLVVSEAIDFVNRFEGGIEAIRNRNHEKVIEMGRMLAEAWGTFLGSPPELCGSMVMVGMPGCLGVESDDDAMRVRTMLRKDFQVEVPVYYNSRRVEGQEMTKDKNGDPVTGYVRISHQVYNVTEDYERLRDVVNKLVSEGFTSSKLRPSEKQEA

SEQ ID NO: 273 - protein, 50 aa, Artificial sequence
  motif 7
  VARIANT (7)..(7): / replace = "Glu"
  VARIANT (8)..(8): / replace = "Lys"
  VARIANT (13)..(13): / replace = "Gly"
  VARIANT (16)..(16): / replace = "Ser"
  VARIANT (19)..(19): / replace = "Ser" / replace = "Cys"
  VARIANT (21)..(21): / replace = "Asp" / replace = "Glu"
  VARIANT (22)..(22): / replace = "Ile"
  VARIANT (23)..(23): / replace = "Asn"
  VARIANT (24)..(24): / replace = "Met"
  VARIANT (25)..(25): / replace = "Arg"
  VARIANT (26)..(26): / replace = "Asp"
  VARIANT (33)..(33): / replace = "Val"
  VARIANT (45)..(45): / replace = "Ala"
  VARIANT (50)..(50): / replace = "His"
CREEGVDQVFVDAAHAIGQVPVDVKEIGADFYTSNLHKWFFCPPSVAFLY

SEQ ID NO: 274 - protein, 50 aa, Artificial sequence
  motif 8
  VARIANT (3)..(3): / replace = "Ala"
  VARIANT (6)..(6): / replace = "Asn"
  VARIANT (8)..(8): / replace = "Ala" / replace = "Asn"
  VARIANT (12)..(12): / replace = "Val"
  VARIANT (19)..(19): / replace = "Ser"
  VARIANT (22)..(22): / replace = "Gly"
  VARIANT (24)..(24): / replace = "Ile"
  VARIANT (25)..(25): / replace = "Ile"
  VARIANT (29)..(29): / replace = "Arg" / replace = "Lys"
  VARIANT (30)..(30): / replace = "Asn"
  VARIANT (33)..(33): / replace = "Arg"
  VARIANT (34)..(34): / replace = "Arg" / replace = "Gln"
  VARIANT (37)..(37): / replace = "Gln" / replace = "Ala"
  VARIANT (41)..(41): / replace = "Asp"
  VARIANT (45)..(45): / replace = "Asp"
  misc_feature (46)..(46): Xaa can be any naturally occurring amino acid
  VARIANT (48)..(48): / replace = "Arg" / replace = "Lys"
  VARIANT (49)..(49): / replace = "Lys"
EFSHHDPGVARINNGSFGCCPASVLAAQARWQLLFLRQPDAFYFNXLQPG

SEQ ID NO: 275 - protein, 50 aa, Artificial sequence
  motif 9
  VARIANT (2)..(2): / replace = "Ile"
  VARIANT (16)..(16): / replace = "Gln"
  VARIANT (17)..(17): / replace = "Ala" / replace = "Ile"
  VARIANT (18)..(18): / replace = "Gly"
  VARIANT (19)..(19): / replace = "Arg"
  VARIANT (20)..(20): / replace = "Ser"
  VARIANT (25)..(25): / replace = "Lys" / replace = "Asn"
  VARIANT (28)..(28): / replace = "Arg"
  VARIANT (29)..(29): / replace = "Asn"
  VARIANT (31)..(31): / replace = "Val" / replace = "Thr"
  VARIANT (33)..(33): / replace = "Val"
  VARIANT (37)..(37): / replace = "Cys"
  VARIANT (40)..(40): / replace = "Gln"
  VARIANT (41)..(41): / replace = "Ser"
  VARIANT (47)..(47): / replace = "Gln" / replace = "His"
SLVDNATTAAAIVLQHVAWAFAEGRFAKGDAVLMLHYAYGAVKKSIEAYV

SEQ ID NO: 276 - DNA, 56 bp, Artificial sequence
  primer: prm18733
ggggacaagtttgtacaaaaaagcaggcttaaacaatgcaagaaaactccaaagat

SEQ ID NO: 277 - DNA, 50 bp, Artificial sequence
  primer: prm18734
ggggaccactttgtacaagaaagctgggtgcataccttctcactctggat

SEQ ID NO: 278 - DNA, 2194 bp, Oryza sativa; identical to SEQ ID NO: 189

SEQ ID NO: 279 - DNA, 3934 bp, Artificial sequence
  espression vector
aatccgaaaagtttctgcaccgttttcaccccctaactaacaatatagggaacgtgtgctaaatataaaatgagaccttatatatgtagcgctgataactagaactatgcaagaaaaactcatccacctactttagtggcaatcgggctaaataaaaaagagtcgctacactagtttcgttttccttagtaattaagtgggaaaatgaaatcattattgcttagaatatacgttcacatctctgtcatgaagttaaattattcgaggtagccataattgtcatcaaactcttcttgaataaaaaaatctttctagctgaactcaatgggtaaagagagagattttttttaaaaaaatagaatgaagatattctgaacgtattggcaaagatttaaacatataattatataattttatagtttgtgcattcgtcatatcgcacatcattaaggacatgtcttactccatcccaatttttatttagtaattaaagacaattgacttatttttattatttatcttttttcgattagatgcaaggtacttacgcacacactttgtgctcatgtgcatgtgtgagtgcacctcctcaatacacgttcaactagcaacacatctctaatatcactcgcctatttaatacatttaggtagcaatatctgaattcaagcactccaccatcaccagaccacttttaataatatctaaaatacaaaaaataattttacagaatagcatgaaaagtatgaaacgaactatttaggtttttcacatacaaaaaaaaaaagaattttgctcgtgcgcgagcgccaatctcccatattgggcacacaggcaacaacagagtggctgcccacagaacaacccacaaaaaacgatgatctaacggaggacagcaagtccgcaacaaccttttaacagcaggctttgcggccaggagagaggaggagaggcaaagaaaaccaagcatcctccttctcccatctataaattcctccccccttttcccctctctatataggaggcatccaagccaagaagagggagagcaccaaggacacgcgactagcagaagccgagcgaccgccttctcgatccatatcttccggtcgagttcttggtcgatctcttccctcctccacctcctcctcacagggtatgtgcctcccttcggttgttcttggatttattgttctaggttgtgtagtacgggcgttgatgttaggaaaggggatctgtatctgtgatgattcctgttcttggatttgggatagaggggttcttgatgttgcatgttatcggttcggtttgattagtagtatggttttcaatcgtctggagagctctatggaaatgaaatggtttagggatcggaatcttgcgattttgtgagtaccttttgtttgaggtaaaatcagagcaccggtgattttgcttggtgtaataaagtacggttgtttggtcctcgattctggtagtgatgcttctcgatttgacgaagctatcctttgtttattccctattgaacaaaaataatccaactttgaagacggtcccgttgatgagattgaatgattgattcttaagcctgtccaaaatttcgcagctggcttgtttagatacagtagtccccatcacgaaattcatggaaacagttataatcctcaggaacaggggattccctgttcttccgatttgctttagtcccagaattttttttcccaaatatcttaaaaagtcactttctggttcagttcaatgaattgattgctacaaataatgcttttatagcgttatcctagctgtagttcagttaataggtaatacccctatagtttagtcaggagaagaacttatccgatttctgatctccatttttaattatatgaaatgaactgtagcataagcagtattcatttggattattttttttattagctctcaccccttcattattctgagctgaaagtctggcatgaactgtcctcaattttgttttcaaattcacatcgattatctatgcattatcctcttgtatctacctgtagaagtttctttttggttattccttgactgcttgattacagaaagaaatttatgaagctgtaatcgggatagttatactgcttgttcttatgattcatttcctttgtgcagttcttggtgtagcttgccactttcaccagcaaagttcatttaaatcaactagggatatcacaagtttgtacaaaaaagcaggcttaaacaatgcaagaaaactccaaagatgctcgaaacggcggcgactcgttgtcgacaacgccaacgcaggtctccaaaaaaccacgcgtcagcttctccataacagaacacgaaatccaccatgaattctctcaccacaaccctaatgtagcccgaattaacaacggtagcttcggtagctgccccggatccgtacttgctgctcaaaagaactggcagctccagttccttcaacaacctgacgacttctacttcaacactctccgtaaaggaattctccactcacgtactgtcatcaaagacctcatcaatgctgacgacgtcgacgagatctcccttgtcgataacgccaccactgccgccgccatcgtccttcaacaaattggccgtgccttcgctgaaggtaattttgctaaaaacgataccgttttaatgctccactgtgcttatcaagctgttaaaaaatcgattcaagcttacgtcacgcgtgctgggggttctgttatcgagattcagttaccgtttccggttacttcgaatgaggagataatttcggagtttaagagaggaatagagaaaggcaaagctaacggtaaaaaaattaggttagcgataattgatcatataacgtcgatgccgtgtgttgttattccggtaaaagagttggttaaaatttgcagagaagaaggtgtggatcaggtttttgttgatgcagctcatgctattggtagtgttgaaataaatgttaaagaaatcggggctgatttttatgtcagtaatttgcataagtggttcttttgccccccatcggttgcttttctgtattgtaagaaagcagcgagtttggaatttgatgtacaccatccggttgtttcacatgagtatggaaatggattgccgatagagagtgcgtggattgggactagggattatagctcacaattagtggtgccggcagctttggagtttgttaatcgatttgaggatgggattcaggggataatgaagaggaaccatgaggaggttgttaagatggggaaaatgctggccgaatcatgggggacaaatcttggttcttcaccggagatgtgtgcgggaatgatcatggttggtctgccttcgagattgcgtgtttcaagtgaagatgatgctttgaggttaagatcgcatttgcgtgagtgtcatggggttgaggttccgatacattatcagggtttaaaagatggtgaggagggagtgaaagataaggatggggttataacagcgtatgctaggatttctcatcaggtttataataagtctgaggattattgcaagcttagggatgctgtaaatcgtctttctgagaatctactgattcgcaaaacgttttatccagagtgagaaggtatgcacccagctttcttgtacaaagtggtgatatcacaagcccgggcggtcttctagggataacagggtaattatatccctctagatcacaagcccgggcggtcttctacgatgattgagtaataatgtgtcacgcatcaccatgggtggcagtgtcagtgtgagcaatgacctgaatgaacaattgaaatgaaaagaaaaaaagtactccatctgttccaaattaaaattggttttaaccttttaataggtttatacaataattgatatatgttttctgtatatgtctaatttgttatcatcc

SEQ ID NO: 280 - protein, 418 aa, Artificial sequence
  motif 10
ITEHEIHHEFSHHNPNVARINNGSFGSCPGSVLAAQKNWQLQFLQQPDDFYFNTLRKGILHSRTVIKDLINADDVDEISLVDNATTAAAIVLQQIGRAFAEGNFAKNDTVLMLHCAYQAVKKSIQAYVTRAGGSVIEIQLPFPVTSNEEIISEFKRGIEKGKANGKKIRLAIIDHITSMPCVVIPVKELVKICREEGVDQVFVDAAHAIGSVEINVKEIGADFYVSNLHKWFFCPPSVAFLYCKKAASLEFDVHHPVVSHEYGNGLPIESAWIGTRDYSSQLVVPAALEFVNRFEDGIQGIMKRNHEEVVKMGKMLAESWGTNLGSSPEMCAGMIMVGLPSRLRVSSEDDALRLRSHLRECHGVEVPIHYQGLKDGEEGVKDKDGVITAYARISHQVYNKSEDYCKLRDAVNRLSENL

SEQ ID NO: 281 - protein, 230 aa, Artificial sequence
  motif 11
NVARINNGSFGSCPGSVLAAQKNWQLQFLQQPDDFYFNTLRKGILHSRTVIKDLINADDVDEISLVDNATTAAAIVLQQIGRAFAEGNFAKNDTVLMLHCAYQAVKKSIQAYVTRAGGSVIEIQLPFPVTSNEEIISEFKRGIEKGKANGKKIRLAIIDHITSMPCVVIPVKELVKICREEGVDQVFVDAAHAIGSVEINVKEIGADFYVSNLHKWFFCPPSVAFLYCKK

SEQ ID NO: 282 - protein, 273 aa, Artificial sequence
  motif 12
HSRTVIKDLINADDVDEISLVDNATTAAAIVLQQIGRAFAEGNFAKNDTVLMLHCAYQAVKKSIQAYVTRAGGSVIEIQLPFPVTSNEEIISEFKRGIEKGKANGKKIRLAIIDHITSMPCVVIPVKELVKICREEGVDQVFVDAAHAIGSVEINVKEIGADFYVSNLHKWFFCPPSVAFLYCKKAASLEFDVHHPVVSHEYGNGLPIESAWIGTRDYSSQLVVPAALEFVNRFEDGIQGIMKRNHEEVVKMGKMLAESWGTNLGSSPEMCAG

SEQ ID NO: 283 - protein, 265 aa, Artificial sequence
  motif 13
CPGSVLAAQKNWQLQFLQQPDDFYFNTLRKGILHSRTVIKDLINADDVDEISLVDNATTAAAIVLQQIGRAFAEGNFAKNDTVLMLHCAYQAVKKSIQAYVTRAGGSVIEIQLPFPVTSNEEIISEFKRGIEKGKANGKKIRLAIIDHITSMPCVVIPVKELVKICREEGVDQVFVDAAHAIGSVEINVKEIGADFYVSNLHKWFFCPPSVAFLYCKKAASLEFDVHHPVVSHEYGNGLPIESAWIGTRDYSSQLVVPAALEFVN

SEQ ID NO: 284 - DNA, 774 bp, Medicago truncatula
atgagtcacgcgcattctcatatcggctccggtagtagaactactcgacgaacttttgaattcgggaagacacatgtagtgaggcctaaaggaaaacatcaagctactatagtttggttgcatggacttggtgataatggtttgagctcatctcagttgttggaatcacttccacttccaaatataaaatggatttgccctactgctcctacccgtcccgtggcgatacttggtggttttccctgcactgcatggtttgatgtgggagagctttcggaagatggtccagatgattgggagggtttagatgcttcagcagcacatattgctaacttgttgtcaacagagccagcagatgtgaaagttggtattggagggttcagcatgggtgcagcaatagcattatactctgcaacatgctatgccatgggaaggtatggaaatggcatcccatatcctgtcaatttaagagcagttgttggactcagtggttggcttccaggatcaaggagcttagggaacaagatagaagtgtcacatgaagcgagaaggcgagctgcttcattaccaattttacagtgtcacggaatcagtgatgatgtagtccactgtaagtatggagagaaatctgctcaatcattaagttcagcagggtttcgatatgttgcattcaaatcctatgaagggattggtcattacacagttccaagagagatgggtgaagtttccacctggcttagttcaaggttgggacttgaaggattttcgtcgtaa

SEQ ID NO: 285 - protein, 257 aa, Medicago truncatula
MSHAHSHIGSGSRTTRRTFEFGKTHVVRPKGKHQATIVWLHGLGDNGLSSSQLLESLPLPNIKWICPTAPTRPVAILGGFPCTAWFDVGELSEDGPDDWEGLDASAAHIANLLSTEPADVKVGIGGFSMGAAIALYSATCYAMGRYGNGIPYPVNLRAVVGLSGWLPGSRSLGNKIEVSHEARRRAASLPILQCHGISDDVVHCKYGEKSAQSLSSAGFRYVAFKSYEGIGHYTVPREMGEVSTWLSSRLGLEGFSS

SEQ ID NO: 286 - DNA, 768 bp, Arabidopsis thaliana
atgagctattctcgtcaaagcatgggttctggtagtagaagtacaaggggctatgagtttggaaggacttatgttgtgaggcctaaaggaaagcaccaagctactattgtttggttgcacggtcttggagacaatggctccagctcgtctcagctattggaaagcctacctcttccaaacatcaaatggatttgtccaactgctccttcgcgtcctgtttcgcttctcggtggatttccttgcactgcctggtttgacgtgggagaaatttctgaggatcttcatgatgatatagaaggcttagatgcttcagctgcacatattgctaacctattatctgctgagccaacagatgtcaaagttgggataggaggtttcagtatgggtgcagcaatagctctctactccacgacgtgctacgctcttggacgttatggaaccggacatgcttatactataaacctacgagctactgtaggacttagcggttggcttcctggttggaggagcttaaggagcaaaatagaaagttcgaatgaggttgcaaggcgcgctgcatcgataccgatcttacttgcacatggaacttcggacgatgtagttccttatagatttggagaaaaatctgctcattcacttgccatggctggattccgacaaactatgttcaaaccatatgaagggcttggtcactatacggttcctaaagaaatggatgaggtggttcactggctcgtctcaaggcttggtctcgagggttcgcgttaa

SEQ ID NO: 287 - protein, 255 aa, Arabidopsis thaliana
MSYSRQSMGSGSRSTRGYEFGRTYVVRPKGKHQATIVWLHGLGDNGSSSSQLLESLPLPNIKWICPTAPSRPVSLLGGFPCTAWFDVGEISEDLHDDIEGLDASAAHIANLLSAEPTDVKVGIGGFSMGAAIALYSTTCYALGRYGTGHAYTINLRATVGLSGWLPGWRSLRSKIESSNEVARRAASIPILLAHGTSDDVVPYRFGEKSAHSLAMAGFRQTMFKPYEGLGHYTVPKEMDEVVHWLVSRLGLEGSR

SEQ ID NO: 288 - DNA, 708 bp, Arabidopsis thaliana
atggcggcttctagtagtagaaatggagcaaatgtacttgacttaaaatgcagtcattttgtggaacctcaaggagatcaaagggccagtatagtatggctgcatgataaggatgagcatttcactgattcagtgcagtttgtgaaaagtttaaaacttaaaaatgtcaactggatttgtccacctatcgtctacacaaatacatcgtacgacttcggatctaatatcaaacaagatgatcgagaggcattagattccgcagctaaatttgttgctgatcttttattgcgtgaaccactaaatgtcgtaaaaggagtaggaggctttggcatgggtgcagtagtagctctccaatttgcaacaaattgtgctcttggacattatcctataaatccccgagttgttgttggaattaatgggtggctttctattacggggagcataacaagcagcatagaatatacagttggggctgtagctcgtgctgcatcacagaaaatcttttttacacgtggagcagagaatcgtctacttccttacacccgtgaagaagaagttgttgagtcccttagagaggctggttttggagacgtctttttcttaatatactcatggcttcgacatgaacatcatttagacatcagagatatgctcaaactctggctggaactgagtctcccaatcaccaaaacttcacctctacgataa

SEQ ID NO: 289 - protein, 235 aa, Arabidopsis thaliana
MAASSSRNGANVLDLKCSHFVEPQGDQRASIVWLHDKDEHFTDSVQFVKSLKLKNVNWICPPIVYTNTSYDFGSNIKQDDREALDSAAKFVADLLLREPLNVVKGVGGFGMGAVVALQFATNCALGHYPINPRVVVGINGWLSITGSITSSIEYTVGAVARAASQKIFFTRGAENRLLPYTREEEVVESLREAGFGDVFFLIYSWLRHEHHLDIRDMLKLWLELSLPITKTSPLR

SEQ ID NO: 290 - DNA, 771 bp, Glycine max
atgagtcatgcacattctcatatgggctcaggtagtagaaccactcgaagagctttcgagtttgggaaaacacatgtagtgaggccaaaaggaaaacatcaagccactatagtttggctgcatggtcttggtgataatggtttgagctcatctcagctcctggaatccttgccacttccaaatataaaatggatttgccctactgctcctacccgtcctgtggcgatacttggtggttttccctgcactgcatggtttgatgtgggagaactttcagaagatggtccagatgattgggagggtttagatacctcggcagcacacattgctaacttgttgtcaacagagccagctgatgtgaaagttggtattggaggcttcagcatgggtgcagccatagccctgtactctgcaacttgttttgccatgggaaggtatggaaatggcataccataccctctaaacttaagaacagtggttggactaagtggttggcttcccggatcaaggagcttaaggaacaagatagaagtgtcacatgaggcaagaaggcgagcagcttcattacccattttgctgtgccatggaatcagtgatgatgtagtcctttacaaatacggagaaaaatctgctcaatccttatgttcagcagggtttcgatatgttgcattcaaatcctatgatgggcttggtcattacacggttcctagagagatggatgaggtttgcacttggtttagttcaagattgggacttgatgggtcctcgtaa

SEQ ID NO: 291 - protein, 256 aa, Glycine max
MSHAHSHMGSGSRTTRRAFEFGKTHVVRPKGKHQATIVWLHGLGDNGLSSSQLLESLPLPNIKWICPTAPTRPVAILGGFPCTAWFDVGELSEDGPDDWEGLDTSAAHIANLLSTEPADVKVGIGGFSMGAAIALYSATCFAMGRYGNGIPYPLNLRTVVGLSGWLPGSRSLRNKIEVSHEARRRAASLPILLCHGISDDVVLYKYGEKSAQSLCSAGFRYVAFKSYDGLGHYTVPREMDEVCTWFSSRLGLDGSS

SEQ ID NO: 292 - DNA, 771 bp, Glycine max
atgagctatccacattatcatatgggctctggtagtagaactgctaggagaagcttggagtttgggaagacacatgtggtgaggccaaaaggaaaacaccaagctactatagtttggctgcatggtcttggtgacaatggtttgagctcttatcagctgctggaatctcttccacttccaaatataaaatggatttgcccaactgctcctacccgtcctgtaaccatacttggtggtttttcttgcactgcatggtttgatatgggagaactttcagaagatggtccagatgattgggagggtttagatgcctcagcatcacatattgccaacttgttgtcaacagagccagctgatgtgaaagtaggaattggaggcttcagtatgggtgctgcagtagctcaatactctgcaacttgttttgccatgggaaggtatggaaatggcatcccttaccctgtcaacctaagagcagttgttggactcagtggctggcttccaggatcaaggagcttaaggaacaaaattgaagtgtcacatgaagcaagaaggcgagctgcttcgttacctgttttgctgagccatggaatcagtgatgatgtagtcctctacaaatacggagagaaatcagctcaatccttaagttcagcagggtttcgatacattacattcaaatcctatgatgggcttggtcattataccgttcctagggagatggatgaggtctctaattggcttagctcaaggctggggcttgggggatccacatga

SEQ ID NO: 293 - protein, 256 aa, Glycine max
MSYPHYHMGSGSRTARRSLEFGKTHVVRPKGKHQATIVWLHGLGDNGLSSYQLLESLPLPNIKWICPTAPTRPVTILGGFSCTAWFDMGELSEDGPDDWEGLDASASHIANLLSTEPADVKVGIGGFSMGAAVAQYSATCFAMGRYGNGIPYPVNLRAVVGLSGWLPGSRSLRNKIEVSHEARRRAASLPVLLSHGISDDVVLYKYGEKSAQSLSSAGFRYITFKSYDGLGHYTVPREMDEVSNWLSSRLGLGGST

SEQ ID NO: 294 - DNA, 786 bp, Glycine max
atgagctatccacattatcatatgggctctggtagtagaactgctagcagaagcttggagtttgggaagacacatgtggtgaggccaaaaggaaagcaccaagctactatagtttggctgcatggtcttggtgataatggtttgagctcttatcagctgctggaatctcttccacttccaaatataaaatggatttgcccaactgctccttctcgccctgtaaccatacttggtggtttttcttgcactgcatggtttgatatgggagagctttcagaagatggtccagttgattgggagagtttagatgcctcagcatcacatattgccaacttgttgtcaacagagccagctgatgttcaatttgtcacagtgaaagtaggaattggaggcttcagtatgggtgctgcagtagctcaatactctgcaacttgttttgccatgggaaggtatggaaatggcatcccttaccctgtcaacttacgagcagttgttggactcagtgggtggcttccaggatcaaggagcttaaggaacaagattgaagtgtcacatgaagcaagaaggcgagctgctttgttacctgttttgctgagccatggaatcagtgatgacgtagttctctacaaatacggagagaaatcagctcaatccttaagttcagcagggtttcgatacattacattcaaatcctatgatgggcttggtcattatactgttcctagggagatggatgaggtctccaattggcttagctcaaggctggggctagggggatccacatga

SEQ ID NO: 295 - protein, 261 aa, Glycine max
MSYPHYHMGSGSRTASRSLEFGKTHVVRPKGKHQATIVWLHGLGDNGLSSYQLLESLPLPNIKWICPTAPSRPVTILGGFSCTAWFDMGELSEDGPVDWESLDASASHIANLLSTEPADVQFVTVKVGIGGFSMGAAVAQYSATCFAMGRYGNGIPYPVNLRAVVGLSGWLPGSRSLRNKIEVSHEARRRAALLPVLLSHGISDDVVLYKYGEKSAQSLSSAGFRYITFKSYDGLGHYTVPREMDEVSNWLSSRLGLGGST

SEQ ID NO: 296 - DNA, 768 bp, Arabidopsis thaliana
atgagttactctcatcaaagcatgggttctggtagtagaaatgcaaggggatatgaatttggaaggacttatgttgtgaggcctaaaggaaagcatcaagccactctagtctggcttcatggtcttggtgacaatggctctagttcatctcagctcatggacagcttgcatcttccaaatataaaatggatttgtccaaccgctccttcgcgtcctgttacaagtcttggtggatttacatgcactgcttggtttgacgttggggaaatttctgaagatggtcatgatgatttggaaggtttagatgcctcagcttcacatattgctaaccttttgtcctctgaaccagcagatgttaaagtaggcataggaggttttagcatgggagcagcaatatctctctactccgcgacttgttatgctcttggacgttatggaactggccatgcgtatcctataaacctacaagctgttgtaggactcagcggctggcttcctggttggaagagcttaaggagcaaaatagaatgttcatttgaggctgcaaggcgtgctgcatcgttaccaattatacttacacatggaacttccgatgatgtggttccttataggtttggagagaaatctgcgcagtctcttggcatggctggatttcgactagccatgtttaaaccatacgaaggacttggtcattataccgttcccagagaaatggatgaggtcgttcactggctcacaacgatgctcggacttgagggctcgcgctaa

SEQ ID NO: 297 - protein, 255 aa, Arabidopsis thaliana
MSYSHQSMGSGSRNARGYEFGRTYVVRPKGKHQATLVWLHGLGDNGSSSSQLMDSLHLPNIKWICPTAPSRPVTSLGGFTCTAWFDVGEISEDGHDDLEGLDASASHIANLLSSEPADVKVGIGGFSMGAAISLYSATCYALGRYGTGHAYPINLQAVVGLSGWLPGWKSLRSKIECSFEAARRAASLPIILTHGTSDDVVPYRFGEKSAQSLGMAGFRLAMFKPYEGLGHYTVPREMDEVVHWLTTMLGLEGSR

SEQ ID NO: 298 - DNA, 777 bp, Glycine max
atgagcttcgctgcaccatcacttggttctgctggtggtagatctgctagaagagcatttgagtttgggagaacctatgttgtcaggcctaaaggtaaacaccaagcaactatagtctggttgcatggcctcggggataatggctccagttggtcccagctattagagacccttcctcttccaaatattaaatggatatgtccgactgctcctactcagccaatatctatatttggtggctttccgtctactgcttggtttgatgttggagatatttcagaagatgctcctgatgatctagaaggtttggatgcttcagctgcacatgttgcgaatttgctgtctacagaacctgcagacattaagcttggtgttggagggttcagtatgggtgcagctactgccctgtactctgtgtcctgctttactgctggaaaatatgggaatggcaatccttatccagccaacccaagtgcagctgttggtttaagtggctggcttccgtgctcaaagaccttgagtaacaagttacaaggggtagatgaagctacaaggcgtgctcagtcctttcctgttttgctgtgtcatggaaaagttgacgatgttgttccttataagtttggtgagaaatcatcgaagtgcttaagttcaactggatttcaggatgtaacttttaaagcttataatgggcttggacactacaccattccagaagagatggatgaggtttgtgcttggctaacatcaaaattgagccttgaggggaatactgcttag

SEQ ID NO: 299 - protein, 258 aa, Glycine max
MSFAAPSLGSAGGRSARRAFEFGRTYVVRPKGKHQATIVWLHGLGDNGSSWSQLLETLPLPNIKWICPTAPTQPISIFGGFPSTAWFDVGDISEDAPDDLEGLDASAAHVANLLSTEPADIKLGVGGFSMGAATALYSVSCFTAGKYGNGNPYPANPSAAVGLSGWLPCSKTLSNKLQGVDEATRRAQSFPVLLCHGKVDDVVPYKFGEKSSKCLSSTGFQDVTFKAYNGLGHYTIPEEMDEVCAWLTSKLSLEGNTA

SEQ ID NO: 300 - DNA, 771 bp, Populus trichocarpa
atgagttttgctggtccttccctggcttctggtggtaaaactgttagaagagctatagaattcggaaggacttatgtggttaagcccaaaggtaaacaccttgccactgttgtttggctacatgggcttggcgataatggctcaagctggtcacagctcttggagactcttcctcttccaaatattaaatggatatgcccaactgcaccgactcaacctgtaactgtattcgggggtttcccatcaacagcttggtttgatgtgggagacctttcagaagatgctcctgatgatacagagggtctggatgctgcagcagcacatgtggcaaatttgctgtcaacagagccctttgacattagacttggaattggaggcttcagcatgggtgctgcaactgctatgtattctgctacctgctttgctgctggaaagtactcagatggcagtgcataccctgccaatttgagtgcaattgttggattaagtggctggcttccatgttcaaagaccctgagtaagaaaataggaggggatgaaaccgcaaggcgtgctgcttccttgcctatattgctctgtcatggcaaaggtgatgatgtggttccttacaaatttggtgaaaaatcctcacgggttttggtttcaactggattccaggatgcaacattcaaagcatacaatgggcttggtcactacacaatccctgaagagatggatgaggtttgtgcttggcttacttctaagttggggcttggagggcgttctccatga

SEQ ID NO: 301 - protein, 256 aa, Populus trichocarpa
MSFAGPSLASGGKTVRRAIEFGRTYVVKPKGKHLATVVWLHGLGDNGSSWSQLLETLPLPNIKWICPTAPTQPVTVFGGFPSTAWFDVGDLSEDAPDDTEGLDAAAAHVANLLSTEPFDIRLGIGGFSMGAATAMYSATCFAAGKYSDGSAYPANLSAIVGLSGWLPCSKTLSKKIGGDETARRAASLPILLCHGKGDDVVPYKFGEKSSRVLVSTGFQDATFKAYNGLGHYTIPEEMDEVCAWLTSKLGLGGRSP

SEQ ID NO: 302 - DNA, 771 bp, Triticum aestivum
atgagcttcggcggcgccagctccgtcgcggccggtgggaagcggccgttcgagtacgggaggacgcatgtggtgaggcccaagggcgcgcacaaggccaccatcgtctggctccacggcctcggcgacaatggagccagctggtctcaactgttggaaactcttccccttcctaatataaaatggatctgcccaactgcacctacgaggcctgtggcaatttttggtggattcccatctactgcatggtttgatgttgctgatctttcagaagattctcctgatgatgttgaggggctggattcctcagctgcacatgttgcaaatttattgtctaccgaacctgcagacatcaagcttggcgttggtggctttagtatgggtgctgctactgcgctttactccggtacttgctttgctcatggaaaatatggaaatggcaatccataccctgtgaacctaagtgtggctgttggtctcagtggctggctcccatgtgccaggtcattgaagaacaaaattgagagctcacaggaggctgcacagaaggcttcatcattacctcttatgctttgtcatggaaaagctgatgatgtggtcctctacaaacatggagagagatctgctgatgcacttaagtcaaccgggtttgcaaatgtggaattcaagtcctacagcagactcgggcactataccgttccagaggagatggacgaagttgtcaagtggcttacagcaagcttggaactcggcagttcatcgtcaacttga

SEQ ID NO: 303 - protein, 256 aa, Triticum aestivum
MSFGGASSVAAGGKRPFEYGRTHVVRPKGAHKATIVWLHGLGDNGASWSQLLETLPLPNIKWICPTAPTRPVAIFGGFPSTAWFDVADLSEDSPDDVEGLDSSAAHVANLLSTEPADIKLGVGGFSMGAATALYSGTCFAHGKYGNGNPYPVNLSVAVGLSGWLPCARSLKNKIESSQEAAQKASSLPLMLCHGKADDVVLYKHGERSADALKSTGFANVEFKSYSRLGHYTVPEEMDEVVKWLTASLELGSSSST

SEQ ID NO: 304 - DNA, 768 bp, Zea mays
atgagcttcggcggcagcagctccctcgcatcaggtgcgaagaggccgttcgagtacgggagaacgcatgtggtgaggcccaagggcacgcacaaggccaccattgtctggctccatggacttggggacaatggagccagctggtctcaactactggaaactcttccccttcctaatataaaatggatatgccccactgcaccttcaagacccgtgtcattgtttggcgggttcccctccacagcatggtttgatgttgctgatctttctgaggatgctcctgatgacattgaggggatggatgcctcagcagcacatgttgcgaatttgttgtcaactgaacccgctgacatcaaacttggtgttggtggctttagtatgggtgctgctactgctctgtactctgcaacttgctttgctcatggaaaatatgggaacggcaatccataccctgtgaacctaagtcttgccgttggtcttagtggctggcttccatgtgccaggaccttgaagaacagaattgaagcctcaccagaggctgcacaaagggcttcaacaatacctcttttgctctgtcatggaaaagctgatgatgtagttctctacaagcacgggcagagatctactgatgccttgaaggcaaatggcttttccaatgtgctcttcaagtcatacaatagtcttggtcactacactgttccagaggagatggatgaagtttgcaaatggctcacagcaaatttggggctcggcacttcgtcatcttga

SEQ ID NO: 305 - protein, 255 aa, Zea mays
MSFGGSSSLASGAKRPFEYGRTHVVRPKGTHKATIVWLHGLGDNGASWSQLLETLPLPNIKWICPTAPSRPVSLFGGFPSTAWFDVADLSEDAPDDIEGMDASAAHVANLLSTEPADIKLGVGGFSMGAATALYSATCFAHGKYGNGNPYPVNLSLAVGLSGWLPCARTLKNRIEASPEAAQRASTIPLLLCHGKADDVVLYKHGQRSTDALKANGFSNVLFKSYNSLGHYTVPEEMDEVCKWLTANLGLGTSSS

SEQ ID NO: 306 - DNA, 699 bp, Hordeum vulgare
  misc_feature (366)..(366): n is a, c, g, or t
atgagcttcagcggcgcctgctccgtcccggccggtgcgaagcggtcgttccagtactggaggactcatgtggcgaggcccaacggggcgcacaaggccaccatcgtgtggcttcacggcctcggctacaatggagccagctggtctcaactgttggaaactcttcccctttctaatattaaatggatttgcccagctgctcctaccaggcccgcggcaattgatggtggattcccatctactgcatggtctgacgttgctgatctttcagaacattctcctgatgatgttgaggggctggattcctcagctgcacatgtggcagatctattgtctaccgagcctgcagacatcaagcttggtgtnggtggctttagtatgggtgctgctactgcgctttactccggtacttgctttgctcatggaaaatatggaaatggccatccataccctgtaaacctagatgtggctgatgggctcagtggctggctcccctgtgccaggtcattggcgaacaaaattgaaagctcacaggaggctgcacagaacgctgcatcattaccttttatgctttgtcatggaaaagctgatgatgtggtcctgtaacaacatggcaagaggactgctgatgcccttaaactcaccggggtttgccaagttgtaattcaggccttaaggatggctcgggccctataccct

SEQ ID NO: 307 - protein, 232 aa, Hordeum vulgare
MSFSGACSVPAGAKRSFQYWRTHVARPNGAHKATIVWLHGLGYNGASWSQLLETLPLSNIKWICPAAPTRPAAIDGGFPSTAWSDVADLSEHSPDDVEGLDSSAAHVADLLSTEPADIKLGVGGFSMGAATALYSGTCFAHGKYGNGHPYPVNLDVADGLSGWLPCARSLANKIESSQEAAQNAASLPFMLCHGKADDVVLQHGKRTADALKLTGVCQVVIQALRMARALYP

SEQ ID NO: 308 - DNA, 768 bp, Helianthus annuus
atgagcttcagcggcccttctgttggtaccggtggtagagctgccagaagggcatttgagtttggacggacgtatgtggtgaaacctaaaggcaaacaccaggcaaccattgtctggttgcatggcctcggtgataatggttcaagctggtcacagctcttggagacgcttccacttccaaatatcaaatggatatgccctacatcacctgcacaaccactaaccttatttggcggctttcccacaactgcatggtttgatgtaagtgacctgtctgaagatgcacatcaagatgaagaagggatggatgcttcagcagcacacgttttgagtctgctctctaccgagccccctaatatcaaacttggtgttggaggctttagtatgggggcggcaaccgctctatactctgcaagttgttttactcatgggaagttcgggaatggaaacgcgtactctactcatttggatgcggttgttggacttagtggctggcttccatgtgcaaaagacctgagtaagaagatcgaaggggaggaagctgcaaatcgtgcttcatcgttgcctattttgctatgtcatggcaaagctgatgatgtggtacgctttcgttttggggagaagtcagcccagaaactatcttccaccggcttcaaaaacctgacattcaaagcctatgactcgcttggccattacacaattccagaagagatggacgaggtttgttcatggctaacttcgaaactagagctggaaggtaagttgtaa

SEQ ID NO: 309 - protein, 255 aa, Helianthus annuus
MSFSGPSVGTGGRAARRAFEFGRTYVVKPKGKHQATIVWLHGLGDNGSSWSQLLETLPLPNIKWICPTSPAQPLTLFGGFPTTAWFDVSDLSEDAHQDEEGMDASAAHVLSLLSTEPPNIKLGVGGFSMGAATALYSASCFTHGKFGNGNAYSTHLDAVVGLSGWLPCAKDLSKKIEGEEAANRASSLPILLCHGKADDVVRFRFGEKSAQKLSSTGFKNLTFKAYDSLGHYTIPEEMDEVCSWLTSKLELEGKL

SEQ ID NO: 310 - DNA, 741 bp, Brassica napus
atgagtatctctggcgctgcacttggttcaggaagaattttaggaagagcggtagagtttgggaaaactcatgtggttaggcccaaagggaaacaccaagctactattgtctggttacatggtcttggcgacaatggctctagctggtctcagcttttggagacccttccccttcccaatatcaaatggatatgcccaactgctccttctcaacctataagtttatttggtgggtttgatgttgtgggcatcaatgaagatggacctgatgatgtagaaggactggacgtggctgccgcacatgttgcaaatttgttgtcgaatgagccttctgacattaagttaggtgttggagggttcagcatgggtgcggggacgtctctatactcagcgacttgttttgctaccggtaaatatggaaatggcaatccttaccctatcaatttaagcaccgtcataggcttaagcggttggcttccttgtgctaagacactggctggcaaactagaagaggaacagatcaagaaccgagctgcgtccttaccaattttagtttgtcatggaaaaggtgatgatgtggtaccgtacaagtttggggagaaatcttcagaggccttgatatcacatgggtttaagaagacaacgttcaaagcctacagtggacttggtcactacaccatcccacaggagatggatgagttgtgcgcgtggttaacatccaacctcggcctccaaggttga

SEQ ID NO: 311 - protein, 246 aa, Brassica napus
MSISGAALGSGRILGRAVEFGKTHVVRPKGKHQATIVWLHGLGDNGSSWSQLLETLPLPNIKWICPTAPSQPISLFGGFDVVGINEDGPDDVEGLDVAAAHVANLLSNEPSDIKLGVGGFSMGAGTSLYSATCFATGKYGNGNPYPINLSTVIGLSGWLPCAKTLAGKLEEEQIKNRAASLPILVCHGKGDDVVPYKFGEKSSEALISHGFKKTTFKAYSGLGHYTIPQEMDELCAWLTSNLGLQG

SEQ ID NO: 312 - DNA, 759 bp, Brassica napus
atgagtatctctggtgctgcacttggttcaggaagaattttaggaagagcggtagagtttgggaaaactcatgtggttaggcccaaagggaaacaccaagctactattgtctggttacatggtcttggcgacaatggctctagctggtctcagcttttggagacccttccccttcccaatatcaaatggatatgcccgactgctccttctcaacctataagtttatttggtggttttccctccacagcttggtttgatgttgtgggcatcaatgaagatggacctgatgatgtagaaggactggacgtggctgccgcacatgttgcaaatttgttgtcgaatgagccttctgacattaagttaggtgttggagggttcagcatgggtgcggggacgtctctatactcagcgacttgttttgcagtcggtaaatatggaaatggcaatccttaccctatcaatttaagcacagccataggcttaagcggttggcttccttgtgttaagacactggctggcaaactagaagaggaacagatcaagaatcgagctgcgtccttaccaattttagtttgccatggaaaaggtgatgatgtggtgccgtacaagtttggggagaaatcttcagaggccttgatatcacatgggtttaagaagacaacgttcaaagcctatagtggacttggtcactacaccatcccacaggagatggatgagttgtgcgcttggttaacatccaacctcggcctccaaggttga

SEQ ID NO: 313 - protein, 252 aa, Brassica napus
MSISGAALGSGRILGRAVEFGKTHVVRPKGKHQATIVWLHGLGDNGSSWSQLLETLPLPNIKWICPTAPSQPISLFGGFPSTAWFDVVGINEDGPDDVEGLDVAAAHVANLLSNEPSDIKLGVGGFSMGAGTSLYSATCFAVGKYGNGNPYPINLSTAIGLSGWLPCVKTLAGKLEEEQIKNRAASLPILVCHGKGDDVVPYKFGEKSSEALISHGFKKTTFKAYSGLGHYTIPQEMDELCAWLTSNLGLQG

SEQ ID NO: 314 - DNA, 759 bp, Arabidopsis thaliana
atgagtatctccggtgctgcagttggttcaggcagaaatttaagaagagcggtagagtttgggaaaactcatgtggttaggcctaaagggaaacatcaagcaactattgtctggttacatgggcttggggacaatggctcgagctggtcccagcttttggagacccttccccttccaaatatcaaatggatttgcccgactgctccttctcaaccaataagtttatttggtggttttccctccacagcttggtttgatgttgtggacatcaatgaagatggacctgatgatatggaaggattggatgtggctgctgcacatgttgcaaatctgttgtcgaatgagcctgctgacattaaattaggtgttggaggattcagcatgggtgcggcgacatctctatattctgcaacttgttttgctctcggtaaatatggaaatggcaatccataccctatcaatttaagcgcaatcataggcttaagcggctggcttccttgtgcaaagacattggctggcaaactagaagaggaacagatcaagaaccgagctgcatcgttgcccattgttgtctgtcatggaaaagctgatgatgtggtaccgttcaagtttggggagaaatcttcacaggctttgctttcaaatgggtttaagaaggtgaccttcaaaccttacagtgcacttggtcaccacacaatcccacaggagttggatgagttgtgcgcatggttgacatccacgctcagcctcgaaggttga

SEQ ID NO: 315 - protein, 252 aa, Arabidopsis thaliana
MSISGAAVGSGRNLRRAVEFGKTHVVRPKGKHQATIVWLHGLGDNGSSWSQLLETLPLPNIKWICPTAPSQPISLFGGFPSTAWFDVVDINEDGPDDMEGLDVAAAHVANLLSNEPADIKLGVGGFSMGAATSLYSATCFALGKYGNGNPYPINLSAIIGLSGWLPCAKTLAGKLEEEQIKNRAASLPIVVCHGKADDVVPFKFGEKSSQALLSNGFKKVTFKPYSALGHHTIPQELDELCAWLTSTLSLEG

SEQ ID NO: 316 - DNA, 762 bp, Brassica napus
atgagtctctctggtgctgctgcagttggttcaagcagaaacttgaaaaaagcggtggagtttgggaaaactcatgtggttaagcccaaagggaaacaccaagctactattgtctggctacatggccttggcgacaatggctccagctggtcccagattttggagacccttcctcttccgaatatcaaatggatctgccctacagctccttctcaaccaataagtctgtttggtggttttccctccacagcttggtttgatgttgtggacctcactgagaatggacctgatgatgtagaaggactggatgtggctgccgcacatgttgcaaatctgttggcaaatgagcctgctgacattaagttaggtgttggagggttcagcatgggggcagggacgtctctgtattctgcgacttgttttgcccttggcaaatatggaaatggcaatccttaccctatcaatttaagcgcagtcattggcttaagcgggtggcttccttgtgctaagacactgactggtaaactagaagaggagcagatcaagaaccgggctgcatcgttacccatcttagtttgtcatggaaaaggtgatgatgttgtaccgttcaagtttggggagaaatcttcacaggccttgttatcacatgggtttaagaagacgaccttcaaagcttacggtgcacttggtcactacacaatcccacaggagacggaggatgtatgcgcgtggttgacatccaccctcggcctcgaaggttga

SEQ ID NO: 317 - protein, 253 aa, Brassica napus
MSLSGAAAVGSSRNLKKAVEFGKTHVVKPKGKHQATIVWLHGLGDNGSSWSQILETLPLPNIKWICPTAPSQPISLFGGFPSTAWFDVVDLTENGPDDVEGLDVAAAHVANLLANEPADIKLGVGGFSMGAGTSLYSATCFALGKYGNGNPYPINLSAVIGLSGWLPCAKTLTGKLEEEQIKNRAASLPILVCHGKGDDVVPFKFGEKSSQALLSHGFKKTTFKAYGALGHYTIPQETEDVCAWLTSTLGLEG

SEQ ID NO: 318 - DNA, 669 bp, Helianthus annuus
atgagtctcagtggcccttccggtggtagaactggaagaaggacacttgagttcggaaagacatatgtggtaaaacctaaaggcaaacaccttgcaaccattgtgtggttgcatggccttggtgacaatggctcgagttgggcccagcttttggatacccttcctcttccaaacatcaaatggatatgccctacttctccttctcaacccttgaccttatttggtggctttccgtcaaatgcatggtttgatgtgagtgacctgtctgaagatgcaaaacaagacgtagagggtcttgattcttcagctgcacatgttttaagtctactctcgactgagcccgcagacgtcaaacttggtgtaggaggcttcagtatgggtccagcacttgctttgtactctgcggtttcctttgctaatggaaaacttgggaatggcgattctttctcagcccgtttggatgcagttgtaggccttagtggctggcttccatgtgcaaaggatctaacgaacaaggtagaaagtgatgaagctgcagcccgagcatcgtccttgcctattttgctttgtcatggcaaagctgatgatgtggttctcttccgatacggtgacaagtcagctgaagaaactaacttcgaccggcttccaaaacttgaccttcaaaactaa

SEQ ID NO: 319 - protein, 222 aa, Helianthus annuus
MSLSGPSGGRTGRRTLEFGKTYVVKPKGKHLATIVWLHGLGDNGSSWAQLLDTLPLPNIKWICPTSPSQPLTLFGGFPSNAWFDVSDLSEDAKQDVEGLDSSAAHVLSLLSTEPADVKLGVGGFSMGPALALYSAVSFANGKLGNGDSFSARLDAVVGLSGWLPCAKDLTNKVESDEAAARASSLPILLCHGKADDVVLFRYGDKSAEETNFDRLPKLDLQN

SEQ ID NO: 320 - DNA, 777 bp, Medicago truncatula
atgagcaacagaaacttctcagctagttctggtagtggaaatgctagcaggacatttgagtttggaaggactcatgtggttagacctaaagggaagcatcaagcaactattgtttggctacatggtattggcgataacggctcgagctggtcccaactattggaaactcttcctcttccaaatattaaatggatttgtccaactgctcctacgcggcctgtagccttatttggtggatttccttgcactgcttggtctgatgttggtgatatttcagaagacgctcctaatgatttggagggtttagatgcttctgcagcacatgttgccaatcttttgtcaacagagcctccaaatatcatactcggtattggtggcttcagtaatggtgctgcaactgcactgtactcagctacatgtcatgttctgggacactatggaaatggaaacatttaccctattaacttaagcgcaattgtttcattaagtggctggcttccttgttcaaggaccttaagaaaccagatcggaggatcacgtgatggtataaggcgtgcaacatcgttgcccttatttatcggccatggaagcgctgatgatgtggttgcatatgaacatggagagaattctgcaaggaccttaagctcagctggattccagaatcttatattcagaagctacaatgggttaggtcactatacagttcctgaagagactgatgaagtttgcagatggctaactgcaaatttggcacttgaggggttaaggttgaactag

SEQ ID NO: 321 - protein, 258 aa, Medicago truncatula
MSNRNFSASSGSGNASRTFEFGRTHVVRPKGKHQATIVWLHGIGDNGSSWSQLLETLPLPNIKWICPTAPTRPVALFGGFPCTAWSDVGDISEDAPNDLEGLDASAAHVANLLSTEPPNIILGIGGFSNGAATALYSATCHVLGHYGNGNIYPINLSAIVSLSGWLPCSRTLRNQIGGSRDGIRRATSLPLFIGHGSADDVVAYEHGENSARTLSSAGFQNLIFRSYNGLGHYTVPEETDEVCRWLTANLALEGLRLN

SEQ ID NO: 322 - DNA, 774 bp, Oryza sativa
atgagcagcttcggcggcaccagctccgtcgcctccggtggtgggaagaggctcgagtacgggcggacgcatgtcgtgaggcccaagggcgcgcacaaggccaccatcgtctggctccacggcctcggggacaacggagccagctggtctcaactactggaaacccttccccttcccaatataaaatggatttgccccaccgcgcctacaaggccagtggcagtttttggtgggttcccatcaactgcatggtttgatgttgctgatctttcagaagacgctcctgatgatgttgaggggttggatgcctcagctgcacatgttgcaaacttattatcaactgagccagctgacatcaaacttggtgttggtggctttagcatgggcgcagctaccgccctttactctgcaacctgctatgctcatggaaaatacggaaatggcaatccatatcctgtgaacttaagtgtgtctgttggtctcagtggctggcttccttgtgccaggtctttgaagaacaaaattgaaagctcacaggaggctgcacaaaaggcttcatccatacctcttttgctttgtcatggaaaagctgatgatgtagttctctacaagcatggtgagaaatctgctgacgcactgaagacaactggattttcaaatgtggtgttcaagtcctacaacagacttggacactacactgttccggaggagatggatgaagtctgcaaatggctcaccgcgaacttgggggtcagcagctcatcgtcggcttga

SEQ ID NO: 323 - protein, 257 aa, Oryza sativa
MSSFGGTSSVASGGGKRLEYGRTHVVRPKGAHKATIVWLHGLGDNGASWSQLLETLPLPNIKWICPTAPTRPVAVFGGFPSTAWFDVADLSEDAPDDVEGLDASAAHVANLLSTEPADIKLGVGGFSMGAATALYSATCYAHGKYGNGNPYPVNLSVSVGLSGWLPCARSLKNKIESSQEAAQKASSIPLLLCHGKADDVVLYKHGEKSADALKTTGFSNVVFKSYNRLGHYTVPEEMDEVCKWLTANLGVSSSSSA

SEQ ID NO: 324 - DNA, 609 bp, Zea mays
atgagctacggcggcagcagctccctcgcgcccggtgccaagaggccgttcgagtacgggagaacgcatgtggtgaggcccaagggcacgcacaaggccaccattgtctggctccacggccttggtgacaatggaaccagctggtctcaactgctggaaacgcttccccttcctaatataaaatggatatgcccaactgcaccttcaagacctgtgtcattgtttggcgggttcccctgcacagcatggtttgatgttgctgacctttctgaggatgctcccgatgacactgaggggatggatgcctcagcagcacatgttgcaaatttgttgtcaactgagcccgctgatatcaagcttggtgttggtggctttagtatgggtgctgctactgctctgtactctgcaacttgctttgctcatggaaaatatgggaacggcaatccataccctgtgaacctaagtcttgccgttggtcttagtggctggcttccatgtgccaggaccttgaagaacagaattgaagcctcaccagaggctgcacaaagggcttcaacaatacctcttttgctctgtcatggaaaaggtaacactgcttcctgcccatag

SEQ ID NO: 325 - protein, 202 aa, Zea mays
MSYGGSSSLAPGAKRPFEYGRTHVVRPKGTHKATIVWLHGLGDNGTSWSQLLETLPLPNIKWICPTAPSRPVSLFGGFPCTAWFDVADLSEDAPDDTEGMDASAAHVANLLSTEPADIKLGVGGFSMGAATALYSATCFAHGKYGNGNPYPVNLSLAVGLSGWLPCARTLKNRIEASPEAAQRASTIPLLLCHGKGNTASCP

SEQ ID NO: 326 - DNA, 777 bp, Populus trichocarpa
atgagctacaatacctccgctgcaggatctggcagtaggaatactacaagaacatttgagtttggaaggacccatgtggtgaggcctaaaggaaagcaccaggccactatagtttggctgcatggccttggtgataagggctcaagctggtcccagctcttggaaacccttccccttccaaatattaaatggatatgcccaactgctccaaccaggccagtagcaatatttggtggatttccatgcactgcttggtctgatgctggggatatttcggaagatgcccctgatgatttggaggggctagatgcttcagcagcgcatgttgcaaatcttttatcgaccgagcctgctgatatgtttttatcattgtttttcagtcaaacttggtgtaggtggcttcagtatgggagctgcaaccgccctctactctgccacatgccacatttttgggcaatatgggaatggaaacctgtacccagtcaacttaagtgcaattgttggtctaagtggctggcttccatgttcaaggtttggtttcagagttctgacgtgaccttgaggaaccggatggaaagatcagatgaagctgcaagacgtgcagcatccttgcccatcttgctctgccatggctcaggtgatgatgtggttgcacataaacatggagagaaatcagcacaagcattaagttcagctggattccgtaatcttacatttagaagctataatgggtatatctatctcccactaggcattatagcatacccaactatataa

SEQ ID NO: 327 - protein, 258 aa, Populus trichocarpa
MSYNTSAAGSGSRNTTRTFEFGRTHVVRPKGKHQATIVWLHGLGDKGSSWSQLLETLPLPNIKWICPTAPTRPVAIFGGFPCTAWSDAGDISEDAPDDLEGLDASAAHVANLLSTEPADMFLSLFFSQTWCRWLQYGSCNRPLLCHMPHFWAIWEWKPVPSQLKCNCWSKWLASMFKVWFQSSDVTLRNRMERSDEAARRAASLPILLCHGSGDDVVAHKHGEKSAQALSSAGFRNLTFRSYNGYIYLPLGIIAYPTI

SEQ ID NO: 328 - DNA, 774 bp, Populus trichocarpa
atgagctacaatacctctgctgtaggttctggcagcaggaatactacaagaacatttgaatttggaagaacccatgtggtgaggcctaaaggaaagcaccaggccactatagtttggctgcacggtcttggtgataagggctcaagctggtcccagctcttggaaactcttcctcttcctaatattaaatggatatgcccaactgctccaaccaggccagtagcaatatttggtggatttccatgcactgcttggtttgatgtgggggatatttcagaagacgcccctgatgatttggaggggctagaagcttcagcaacacatgttgcgaatcttttatcgaccgagcctgctgatatcaaacttggtgtaggtggcttcagtatgggtgctgcaactgccctctactctgccacatgccatgttttagggcaatatgggaatggaaaccagtaccccatcaacttaactgcagttgttggtctaagtggctggcttccgtgttcaaggaccttgaggagccggatagaaagatcagacgaagctgcaagacgtgcagcatctttgcctatcctgctgtgtcatggctcgggtgatgatgtggttgcacataaacatggagagaaatcagcgcaggcattaagttcagctggattccgaaatcttacgtttagaagctataatgggcttggtcattacacaatccctgaagagatggatgaagtatgtcactggctaaccactaggttagggctcgacgggtcatggtcttga

SEQ ID NO: 329 - protein, 257 aa, Populus trichocarpa
MSYNTSAVGSGSRNTTRTFEFGRTHVVRPKGKHQATIVWLHGLGDKGSSWSQLLETLPLPNIKWICPTAPTRPVAIFGGFPCTAWFDVGDISEDAPDDLEGLEASATHVANLLSTEPADIKLGVGGFSMGAATALYSATCHVLGQYGNGNQYPINLTAVVGLSGWLPCSRTLRSRIERSDEAARRAASLPILLCHGSGDDVVAHKHGEKSAQALSSAGFRNLTFRSYNGLGHYTIPEEMDEVCHWLTTRLGLDGSWS

SEQ ID NO: 330 - DNA, 708 bp, Glycine max
atgagctacagtggctcctcaatgagttctggtagtggatcttctagaaggacatttgagtttggaaggacccatgtggtcagacctaaagggaaacaccaggcaactatagtttggctacatggccttggtgataatggctcaagctggtcccaactcttggaaactcttcctcttccaaatattaaatggatttgcccaactgctcctacacggcctgtagccttatttggtggatttccttgcactgcttggtttgatgctggggagatttcagaagaagctcctagtgatttggaggggttagatgcttctgcagcacacgttgccaatcttttgtcaacagagcctccaaatatcaaacttggtattgggggcttcagtatgggtgctgcaactgcactatactcagctacatgccatgttttggggcactatggtaatggaaacatttaccctatcaacttaagtgctattgtttctttaagtggctggcttccttgttcaaggactttgaaaaaccaaattgaacgatcacgtgatggcataaggcgtgcagcatcgttgcccttatttctctgccatggtagaggtgatgatgtggttgcatatgaacatggggagaggtctgcagtgaccttaagttcatcagattccagaatcttatatttaggagctacaatgggttgggtcactatacagtcctga

SEQ ID NO: 331 - protein, 235 aa, Glycine max
MSYSGSSMSSGSGSSRRTFEFGRTHVVRPKGKHQATIVWLHGLGDNGSSWSQLLETLPLPNIKWICPTAPTRPVALFGGFPCTAWFDAGEISEEAPSDLEGLDASAAHVANLLSTEPPNIKLGIGGFSMGAATALYSATCHVLGHYGNGNIYPINLSAIVSLSGWLPCSRTLKNQIERSRDGIRRAASLPLFLCHGRGDDVVAYEHGERSAVTLSSSDSRILYLGATMGWVTIQS

SEQ ID NO: 332 - DNA, 777 bp, Glycine max
atgagctacagtggctcctcaatgagttctggtagtggatcttctagaaggacatttgagtttggaaggacccatgtggtcagacctaaagggaaacaccaggcaactatagtttggctacatggccttggtgataatggctcaagctggtcccaactcttggaaactcttcctcttccaaatattaaatggatttgcccaactgctcctacacggcctgtagccttatttggtggatttccttgcactgcttggtttgatgctggggagatttcagaagaagctcctagtgatttggaggggttagatgcttctgcagcacacgttgccaatcttttgtcaacagagcctccaaatatcaaacttggtattgggggcttcagtatgggtgctgcaactgcactatactcagctacatgccatgttttggggcactatggtaatggaaacatttaccctatcaacttaagtgctattgtttctttaagtggctggcttccttgttcaaggaccttgaaaaaccaaattgaacgatcacgtgatggcataaggcgtgcagcatcgttgcccttatttctctgccatggaagaggtgatgatgtggttgcatatgaacatggggagaggtctgcagtgaccttaagttcatcaggattccagaatcttatatttaggagctacaatgggttgggtcactatacagtccctgaagagactgatgaagtttgcaggtggctaactgcaaatttgggactggaggggtttcggttgaactag

SEQ ID NO: 333 - protein, 258 aa, Glycine max
MSYSGSSMSSGSGSSRRTFEFGRTHVVRPKGKHQATIVWLHGLGDNGSSWSQLLETLPLPNIKWICPTAPTRPVALFGGFPCTAWFDAGEISEEAPSDLEGLDASAAHVANLLSTEPPNIKLGIGGFSMGAATALYSATCHVLGHYGNGNIYPINLSAIVSLSGWLPCSRTLKNQIERSRDGIRRAASLPLFLCHGRGDDVVAYEHGERSAVTLSSSGFQNLIFRSYNGLGHYTVPEETDEVCRWLTANLGLEGFRLN

SEQ ID NO: 334 - DNA, 750 bp, Zea mays
  misc_feature (545)..(545): n is a, c, g, or t
atgatctatgggggcagctcttctggcgggagaggtgggcggcgtgtggagtacgggcggacgtacgtggtgaggcccaaggggaggcaccaggccaccattgtgtggctccatggcatcggagacaatggcggcagctggtcccatctcctgtattctcttccactgcccaatgtcaaatggatttgccctattgcaccaacgcggcctgtcgcggctttcggtggattcccttgcactgcatggttcgatgtggaagagacttcactggacggccactctgacatcaaaggcatggactcttcacccgcgcatgtggcgaacctgctgtcctccgagccatctgatgtgagccttgagataagagggttcagcatgggcgctgccgctgcgctccactccgccgcgtgctactctcacggcagattcaccaacggtgtcgcctatcagatcaacctcagggtcgtcgtcggtttgagtggctggcttcctagctccaggaccctaaggagcaagatcgagagctcgcagctcgcgcttcgaanagcttccggcttgccaatcctgctcagccatggaatggccgatgaggttgtcacctacaggaacggcgagaggtcagctgagattctacggagctcgggattccagtacacctacttcaaaccctacaacgggcttggtcactacactatccctgaagagatggacgacgtcagcaaggggctgaggtcaacgatgggactctga

SEQ ID NO: 335 - protein, 249 aa, Zea mays
  misc_feature (182)..(182): Xaa can be any naturally occurring amino acid
MIYGGSSSGGRGGRRVEYGRTYVVRPKGRHQATIVWLHGIGDNGGSWSHLLYSLPLPNVKWICPIAPTRPVAAFGGFPCTAWFDVEETSLDGHSDIKGMDSSPAHVANLLSSEPSDVSLEIRGFSMGAAAALHSAACYSHGRFTNGVAYQINLRVVVGLSGWLPSSRTLRSKIESSQLALRXASGLPILLSHGMADEVVTYRNGERSAEILRSSGFQYTYFKPYNGLGHYTIPEEMDDVSKGLRSTMGL

SEQ ID NO: 336 - DNA, 750 bp, Zea mays
atgatctatgggggcagctcttctggcgggagaggtgggcggcgtgtggagtacgggcggacgtacgtggtgaggcccaaggggaggcaccaggccaccattgtgtggctccatggcatcggagacaatggcggcagctggtcccagctcctggattctcttccactgcccaatgtcaaatggatttgccctactgcaccaacgcggcctgtcgcggctttcggtggattcccttgcactgcatggttcgatgtggacgagacttcactggacggccacgctgacatcgaaggcatggacgcttcagccgcgcatgtggcgaacctgctgtcctccgagccatctgatgtgagccttgggataggagggttcagcatgggcgctgccgctgcgctccactccgccgcgtgctacgctcacggcagattcaccaacggtgtcgcctatccgatcaacctcagggtcgtcgtcggtttgagtggctggcttcctagctccaggaccctaaggagcaagatcgagagctcgcagctcgcgcttcgaaaagcttccggcttgccaatcctgctcagccatggaatggccgatgaggttgtcacctacaggaacggcgagaggtcagctgagattctacggagctcgggattccagtacacctacttcaaaccctacaacgggcttggtcactacactatccctgaagagatggacgacgtcagcaagtggctgaggtcaacgctgggactctga

SEQ ID NO: 337 - protein, 249 aa, Zea mays
MIYGGSSSGGRGGRRVEYGRTYVVRPKGRHQATIVWLHGIGDNGGSWSQLLDSLPLPNVKWICPTAPTRPVAAFGGFPCTAWFDVDETSLDGHADIEGMDASAAHVANLLSSEPSDVSLGIGGFSMGAAAALHSAACYAHGRFTNGVAYPINLRVVVGLSGWLPSSRTLRSKIESSQLALRKASGLPILLSHGMADEVVTYRNGERSAEILRSSGFQYTYFKPYNGLGHYTIPEEMDDVSKWLRSTLGL

SEQ ID NO: 338 - DNA, 750 bp, Triticum aestivum
atgagctcctccggcgcccgcggtgtccgtcgagagtacggccggacctatgtggtgaggcccaaggggaggcacctggccaccattgtctggctccacggcataggcgacaacggaaacagctggtcccaggtgctgggcaatctcccgttggataatgtcaaatggatttgccctactgcgccaacgcggcccgtagcggccttcggtggattcccatgtactgcatggttcgatgtggaggagacttcggttgacggccccgacgacgtccaagggctggacgcatccgccgcacacatagcaaacctgctatcgtccgagccctctgatgtgaggcttgggataggcggtttcagcatgggagccgccactgcgctccactctgccgcatgttatgctcatggaaggttctcaaacggtgttgcctaccctattaccctcagcgctatcattgggttgagcggctggcttccctgctccaggaccctgaggaccaagattgagagctcacagactgctttcaggagggctgctgccttgccgataatgcttggccatggaagaggcgacgaggtagtcacgtacaggaacggcgagaggtcggccgagtttctgcggaattcgggcttttcgtacctgaatttcaaagcctacaacggactgggccatcacaccatccctgaggaaatggacgatgtctccaagtggctcagggcaaggctcgggcttgatcgctcttgcggctaa

SEQ ID NO: 339 - protein, 249 aa, Triticum aestivum
MSSSGARGVRREYGRTYVVRPKGRHLATIVWLHGIGDNGNSWSQVLGNLPLDNVKWICPTAPTRPVAAFGGFPCTAWFDVEETSVDGPDDVQGLDASAAHIANLLSSEPSDVRLGIGGFSMGAATALHSAACYAHGRFSNGVAYPITLSAIIGLSGWLPCSRTLRTKIESSQTAFRRAAALPIMLGHGRGDEVVTYRNGERSAEFLRNSGFSYLNFKAYNGLGHHTIPEEMDDVSKWLRARLGLDRSCG

SEQ ID NO: 340 - DNA, 750 bp, Zea mays
atgagctatgggggcagctcttctggcgggcgaggtgggcggcgtgtggagtacgggcggacgtacgtggtgaggcccaaggggaggcaccaggccaccattgtgtggctccatggcatcggcgacaatggcggcagctggtcccagctcctggattctcttccactgcccaatgtcaaatggatttgccctactgcaccaacgcggcctgtcgcggctttcggtggattcccttgcactgcatggttcgatgtggacgagacttcactggacggccacgctgacatcgaaggcatggacgcttcagccgcgcatgtggcgaacctgctgtcctccgagccatctgatgtgagccttgggataggagggttcagcatgggcgctgccgctgcgctccactccgccgcgtgctacgctcacggcagattcaccaacggtgtcgcctatccgatcaacctcagggtcgtcgtcggtttgagtggctggcttcctagctccaggaccctaaggagcaagatcgagagctcgcagctcgcgcttcgaaaagcttccggcttgccaatcctgctcagccatggaatggccgatgaggttgtcacctacaggaacggcgagaggtcagctgagattctacggagctcgggattccagtacacctacttcaaaccctacaacgggcttggtcactacactatccctgaagagatggacgacgtcagcaagtggctgaggtcaacgctgggactctga

SEQ ID NO: 341 - protein, 249 aa, Zea mays
MSYGGSSSGGRGGRRVEYGRTYVVRPKGRHQATIVWLHGIGDNGGSWSQLLDSLPLPNVKWICPTAPTRPVAAFGGFPCTAWFDVDETSLDGHADIEGMDASAAHVANLLSSEPSDVSLGIGGFSMGAAAALHSAACYAHGRFTNGVAYPINLRVVVGLSGWLPSSRTLRSKIESSQLALRKASGLPILLSHGMADEVVTYRNGERSAEILRSSGFQYTYFKPYNGLGHYTIPEEMDDVSKWLRSTLGL

SEQ ID NO: 342 - DNA, 765 bp, Oryza sativa
atgagctacgggagcagctcttctggggggcgaggcgggcggcgggtggagtacgggaggacgtacgtggtgaggcccaaggggaggcaccaggccaccattgtgtggctccatggcctcggcgacaatggcgcaagctggtcccagctactggattctcttcctctgcctaatatcaaatggatttgccctactgcaccaacacgccctgttgctgctttcggtggattcccttgcacagcatggtttgatgtggaggacacttccgtggatggccgtgatgatattgaagggcttgatgcttcagctgcacacgttgcaaacctactgtcatccgagccatctgatgtgaagcttgggataggtggtttcagcatgggtgctgccgctgccctccactctgctgcatgctatgctcatggaagattcacaaacggcgttgcctacccggtcaccctcagcgccgtcatcggtttgagcggttggcttccctgttcaaggactctgaagagcaagatggacagctctcagactgcactgagaagggctggtgccttaccaatcctgctcagccatggaagagctgatgaggttgtcacctacagaaatggtgagaaatcagccgatttcctgcgaggctcgggttttcagtatctgaattttaaaccctacaacggcctggggcattataccatccctgaagaaatggacgatgtctgcaagtggctcagttcaaggctgggacttgaccgatcccgcggctaa

SEQ ID NO: 343 - protein, 254 aa, Oryza sativa
MSYGSSSSGGRGGRRVEYGRTYVVRPKGRHQATIVWLHGLGDNGASWSQLLDSLPLPNIKWICPTAPTRPVAAFGGFPCTAWFDVEDTSVDGRDDIEGLDASAAHVANLLSSEPSDVKLGIGGFSMGAAAALHSAACYAHGRFTNGVAYPVTLSAVIGLSGWLPCSRTLKSKMDSSQTALRRAGALPILLSHGRADEVVTYRNGEKSADFLRGSGFQYLNFKPYNGLGHYTIPEEMDDVCKWLSSRLGLDRSRG

SEQ ID NO: 344 - DNA, 705 bp, Oryza sativa
atgagttactatggaagcagttcttctggtggacggggtggtcagagagttgagtacgggaggacctatgtggtgaggccaaagggaaggcaccaagccaccattgtgtggcttcatggcctaggtgacaatggtgcaagctggtcccaactcctggattctctttcattgccaaatatcaagtggatttgccccaccgcagcaacccagcctgtcacagcatttggtggattcccttgcactgcatggtttgatgtggaggatacttcagtggatggccgtgacgacattgaaggactggatgcttcagctgcgcacattgcaaacttgctgtcgtcagagccgcctgatgtgaagcttgggattggtggtttcagcatgggtgctgctgcttccctctactcagctgcgtgctatgctcatggcaaattcgcaagtggcatcccctacccaatcacacttagcgcggtcatcagcttgagtggatggctcccttgctccaggaccctgaggggcaagatggagagctcacacatagctgcaagaagagctgcctccttgcctatcttacttagccatggaagagcggatgaggttgtatcctacaggaatgctgagaggctaggccactataccatccctgaagagatggacgacgttggcaagtggctcagctcaaggcttggcctcgacagatcccgctaa

SEQ ID NO: 345 - protein, 234 aa, Oryza sativa
MSYYGSSSSGGRGGQRVEYGRTYVVRPKGRHQATIVWLHGLGDNGASWSQLLDSLSLPNIKWICPTAATQPVTAFGGFPCTAWFDVEDTSVDGRDDIEGLDASAAHIANLLSSEPPDVKLGIGGFSMGAAASLYSAACYAHGKFASGIPYPITLSAVISLSGWLPCSRTLRGKMESSHIAARRAASLPILLSHGRADEVVSYRNAERLGHYTIPEEMDDVGKWLSSRLGLDRSR

SEQ ID NO: 346 - DNA, 765 bp, Zea mays
atgagctattatggcagcagctcttctggtggacgaagcagtaggagagtcgactatgggaggacatatgtggtgaggccaaagggaaggcacctagccaccattgtgtggctccatggcataggtgacaatggtgctagctggtcccagctcctggattctcttcctctaccaaatatcaagtggatatgccccactgctgcaacccggcctgtcgcggcttttggtggattcccctgcacagcatggtttgacgttgaggacacatctatagatggccgagacgacattgagggactggatgcttcagctgcacacattgcaaatctgctgtcgtctgagccgtctgatgtgaagcttgggattggcggtttcagcatgggcgccgccgttgcccttcactcagcagcatgctatgctcatggcaaattcacaagtggcattccctatccaatcgcactcaacgcagtcatcagtttgagtggctggctcccttgctcaaggaccctgaggagcaagatggagggttcacatattgctgtaagaagggctggctccttgcccatcctgcttagtcatggaagagtggatgaagttgtcgtctacagggatggcgagagatcagctgaggttctgaggaactcaggattctcatttctgactttcaagccctacaacgggttgggccattatacgatccctgaagaactggacgacctctgcaagtggcttagctcgtcgcttggcctcggccgatctcgctaa

SEQ ID NO: 347 - protein, 254 aa, Zea mays
MSYYGSSSSGGRSSRRVDYGRTYVVRPKGRHLATIVWLHGIGDNGASWSQLLDSLPLPNIKWICPTAATRPVAAFGGFPCTAWFDVEDTSIDGRDDIEGLDASAAHIANLLSSEPSDVKLGIGGFSMGAAVALHSAACYAHGKFTSGIPYPIALNAVISLSGWLPCSRTLRSKMEGSHIAVRRAGSLPILLSHGRVDEVVVYRDGERSAEVLRNSGFSFLTFKPYNGLGHYTIPEELDDLCKWLSSSLGLGRSR

SEQ ID NO: 348 - protein, 50 aa, Artificial sequence
  motif 14
  VARIANT (2)..(2): Xaa can be Phe or Tyr
  VARIANT (4)..(4): Xaa can be Lys or Arg
  VARIANT (6)..(6): Xaa can be His or Tyr
  VARIANT (13)..(13): Xaa can be Lys or Arg
  VARIANT (29)..(29): Xaa can be Leu, Ser or Ala
  VARIANT (31)..(31): Xaa can be Ser of Trp
  VARIANT (36)..(36): Xaa can be Glu or Asp
  VARIANT (37)..(37): Xaa can be Ser or Thr"
EXGXTXVVRPKGXHQATIVWLHGLGDNGXSXSQLLXXLPLPNIKWICPTA

SEQ ID NO: 349 - protein, 30 aa, Artificial sequence
  motif 15
  VARIANT (4)..(4): Xaa can be Trp, Ile, Val or Leu
  VARIANT (14)..(14): Xaa can be Ile or Val
  VARIANT (20)..(20): Xaa can be Thr or Ser
  VARIANT (23)..(23): Xaa can be Ala or Ser
  VARIANT (25)..(25): Xaa can be Val or Ile
  VARIANT (27)..(27): Xaa can be Val or Leu
  VARIANT (29)..(29): Xaa can be Ile or Val
PDDXEGLDASAAHXANLLSXEPXDXKXGXG

SEQ ID NO: 350 - protein, 17 aa, Artificial sequence
  motif 16
  VARIANT (7)..(7): Xaa can be Ile or Thr
  VARIANT (13)..(13): Xaa can be Thr or Ala
  VARIANT (15)..(15): Xaa can be Tyr or Phe
  VARIANT (17)..(17): Xaa can be Met, His or Leu
FSMGAAXALYSAXCXAX

SEQ ID NO: 351 - protein, 50 aa, Artificial sequence
  motif 17
  VARIANT (2)..(2): Xaa can be Phe or Tyr
  VARIANT (4)..(4): Xaa can be Lys or Arg
  VARIANT (6)..(6): Xaa can be His or Tyr
  VARIANT (15)..(15): Xaa can be Gln or Lys
  VARIANT (29)..(29): Xaa can be Leu or Ser
  VARIANT (31)..(31): Xaa can be Ser or Trp
  VARIANT (37)..(37): Xaa can be Ser or Thr
EXGXTXVVRPKGKHXATIVWLHGLGDNGXSXSQLLEXLPLPNIKWICPTA

SEQ ID NO: 352 - protein, 29 aa, Artificial sequence
  motif 18
  VARIANT (3)..(3): Xaa can be Gly or Ala
  VARIANT (7)..(7): Xaa can be Trp, Leu or Val
  VARIANT (13)..(13): Xaa can be Ser or Ala
  VARIANT (17)..(17): Xaa can be Ile or Val
  VARIANT (27)..(27): Xaa can be Asp or Asn
  VARIANT (28)..(28): Xaa can be Val or Ile
EDXPDDXEGLDAXAAHXANLLSTEPAXXK

SEQ ID NO: 353 - protein, 11 aa, Artificial sequence
  motif 19
  VARIANT (1)..(1): Xaa can be Leu or Phe
  VARIANT (6)..(6): Xaa can be Cys or Ser
XGGFPXTAWFD

SEQ ID NO: 354 - protein, 50 aa, Artificial sequence
  motif 20
  VARIANT (2)..(2): Xaa can be His or Tyr
  VARIANT (9)..(9): Xaa can be Lys or Arg
  VARIANT (20)..(20): Xaa can be Leu or Ile
  VARIANT (25)..(25): Xaa can be Leu, Ala or Gly
  VARIANT (27)..(27): Xaa can be Ser or Trp
  VARIANT (32)..(32): Xaa can be Glu or Asp
  VARIANT (39)..(39): Xaa can be Ile or Val
  VARIANT (48)..(48): Xaa can be Thr or Ser
TXVVRPKGXHQATIVWLHGXGDNGXSXSQLLXSLPLPNXKWICPTAPXRP

SEQ ID NO: 355 - protein, 50 aa, Artificial sequence
  motif 21
  VARIANT (10)..(10): Xaa can be Gly or Glu
  VARIANT (11)..(11): Xaa can be Glu or Asp
  VARIANT (12)..(12): Xaa can be Leu or Thr
  misc_feature (14)..(14): Xaa can be any naturally occurring amino acid
  VARIANT (15)..(15): Xaa can be Glu, Leu or Val
  misc_feature (17)..(17): Xaa can be any naturally occurring amino acid
  VARIANT (18)..(18): Xaa can be Pro, His or Arg
  misc_feature (20)..(20): Xaa can be any naturally occurring amino acid
  VARIANT (21)..(21): Xaa can be Trp or Ile
  misc_feature (23)..(23): Xaa can be any naturally occurring amino acid
  VARIANT (24)..(24): Xaa can be Leu or Met
  misc_feature (28)..(28): Xaa can be any naturally occurring amino acid
  VARIANT (29)..(29): Xaa can be Ala or Ser
  misc_feature (30)..(30): Xaa can be any naturally occurring amino acid
  VARIANT (31)..(31): Xaa can be Ile or Val
  misc_feature (36)..(36): Xaa can be any naturally occurring amino acid
  VARIANT (37)..(37): Xaa can be Thr or Ser
  misc_feature (39)..(39): Xaa can be any naturally occurring amino acid
  VARIANT (40)..(40): Xaa can be Ala or Ser
  misc_feature (42)..(42): Xaa can be any naturally occurring amino acid
  VARIANT (43)..(43): Xaa can be Lys or Ser
  VARIANT (44)..(44): Xaa can be Val or Leu
FPCTAWFDVXXXSXDGXDDXEGXDASAXHXANLLSXEPXDVXXGIGGFSM

SEQ ID NO: 356 - protein, 21 aa, Artificial sequence
  motif 22
  VARIANT (3)..(3): Xaa can be Ser or Pro
  VARIANT (5)..(5): Xaa can be Glu, Asn or Asp
  VARIANT (7)..(7): Xaa can be Ile or Leu
  VARIANT (12)..(12): Xaa can be Val or Ile
  VARIANT (14)..(14): Xaa can be Arg or Glu
  VARIANT (17)..(17): Xaa can be Gly or Asp
  VARIANT (18)..(18): Xaa can be Glu or Asp
  VARIANT (20)..(20): Xaa can be Ser or Cys
  VARIANT (21)..(21): Xaa can be Thr, Lys or Asn
FKXYXGXGHYTXPXEMXXVXX

SEQ ID NO: 357 - protein, 50 aa, Artificial sequence
  motif 23
  VARIANT (3)..(3): Xaa can be Ser or Pro
  VARIANT (4)..(4): Xaa can be Lys or Arg
  VARIANT (6)..(6): Xaa can be His or Tyr
  VARIANT (29)..(29): Xaa can be Leu or Ser
  VARIANT (32)..(32): Xaa can be Ser or Tyr
EFGXTXVVRPKGKHQATIVWLHGLGDNGXSSXQLLESLPLPNIKWICPTA

SEQ ID NO: 358 - protein, 29 aa, Artificial sequence
  motif 24
  VARIANT (5)..(5): Xaa can be Pro or His
  VARIANT (16)..(16): Xaa can be Ala or Ser
SEDGXDDWEGLDASAXHIANLLSTEPADV

SEQ ID NO: 359 - protein, 32 aa, Artificial sequence
  motif 25
  VARIANT (2)..(2): Xaa can be Ile or Thr
  VARIANT (8)..(8): Xaa can be Leu or Pro
  VARIANT (10)..(10): Xaa can be Lys or Arg
  VARIANT (11)..(11): Xaa can be Tyr or Phe
  VARIANT (21)..(21): Xaa can be Ser or Met
  VARIANT (27)..(27): Xaa can be Val or Ile
  VARIANT (28)..(28): Xaa can be Ala, Met or Thr
  VARIANT (31)..(31): Xaa can be Ser or Pro
GXSDDVVXYXXGEKSAQSLSXAGFRYXXFKXY

SEQ ID NO: 360 - DNA, 3362 bp, Artificial sequence
  expression cassette
aatccgaaaagtttctgcaccgttttcaccccctaactaacaatatagggaacgtgtgctaaatataaaatgagaccttatatatgtagcgctgataactagaactatgcaagaaaaactcatccacctactttagtggcaatcgggctaaataaaaaagagtcgctacactagtttcgttttccttagtaattaagtgggaaaatgaaatcattattgcttagaatatacgttcacatctctgtcatgaagttaaattattcgaggtagccataattgtcatcaaactcttcttgaataaaaaaatctttctagctgaactcaatgggtaaagagagagattttttttaaaaaaatagaatgaagatattctgaacgtattggcaaagatttaaacatataattatataattttatagtttgtgcattcgtcatatcgcacatcattaaggacatgtcttactccatcccaatttttatttagtaattaaagacaattgacttatttttattatttatcttttttcgattagatgcaaggtacttacgcacacactttgtgctcatgtgcatgtgtgagtgcacctcctcaatacacgttcaactagcaacacatctctaatatcactcgcctatttaatacatttaggtagcaatatctgaattcaagcactccaccatcaccagaccacttttaataatatctaaaatacaaaaaataattttacagaatagcatgaaaagtatgaaacgaactatttaggtttttcacatacaaaaaaaaaaagaattttgctcgtgcgcgagcgccaatctcccatattgggcacacaggcaacaacagagtggctgcccacagaacaacccacaaaaaacgatgatctaacggaggacagcaagtccgcaacaaccttttaacagcaggctttgcggccaggagagaggaggagaggcaaagaaaaccaagcatcctcctcctcccatctataaattcctccccccttttcccctctctatataggaggcatccaagccaagaagagggagagcaccaaggacacgcgactagcagaagccgagcgaccgccttcttcgatccatatcttccggtcgagttcttggtcgatctcttccctcctccacctcctcctcacagggtatgtgcccttcggttgttcttggatttattgttctaggttgtgtagtacgggcgttgatgttaggaaaggggatctgtatctgtgatgattcctgttcttggatttgggatagaggggttcttgatgttgcatgttatcggttcggtttgattagtagtatggttttcaatcgtctggagagctctatggaaatgaaatggtttagggtacggaatcttgcgattttgtgagtaccttttgtttgaggtaaaatcagagcaccggtgattttgcttggtgtaataaaagtacggttgtttggtcctcgattctggtagtgatgcttctcgatttgacgaagctatcctttgtttattccctattgaacaaaaataatccaactttgaagacggtcccgttgatgagattgaatgattgattcttaagcctgtccaaaatttcgcagctggcttgtttagatacagtagtccccatcacgaaattcatggaaacagttataatcctcaggaacaggggattccctgttcttccgatttgctttagtcccagaattttttttcccaaatatcttaaaaagtcactttctggttcagttcaatgaattgattgctacaaataatgcttttatagcgttatcctagctgtagttcagttaataggtaatacccctatagtttagtcaggagaagaacttatccgatttctgatctccatttttaattatatgaaatgaactgtagcataagcagtattcatttggattattttttttattagctctcaccccttcattattctgagctgaaagtctggcatgaactgtcctcaattttgttttcaaattcacatcgattatctatgcattatcctcttgtatctacctgtagaagtttctttttggttattccttgactgcttgattacagaaagaaatttatgaagctgtaatcgggatagttatactgcttgttcttatgattcatttcctttgtgcagttcttggtgtagcttgccactttcaccagcaaagttcatttaaatcaactagggatatcacaagtttgtacaaaaaagcaggcttaaacatgagtcacgcgcattctcatatcggctccggtagtagaactactcgacgaacttttgaattcgggaagacacatgtagtgaggcctaaaggaaaacatcaagctactatagtttggttgcatggacttggtgataatggtttgagctcatctcagttgttggaatcacttccacttccaaatataaaatggatttgccctactgctcctacccgtcccgtggcgatacttggtggttttccctgcactgcatggtttgatgtgggagagctttcggaagatggtccagatgattgggagggtttagatgcttcagcagcacatattgctaacttgttgtcaacagagccagcagatgtgaaagttggtattggagggttcagcatgggtgcagcaatagcattatactctgcaacatgctatgccatgggaaggtatggaaatggcatcccatatcctgtcaatttaagagcagttgttggactcagtggttggcttccaggatcaaggagcttagggaacaagatagaagtgtcacatgaagcgagaaggcgagctgcttcattaccaattttacagtgtcacggaatcagtgatgatgtagtccactgtaagtatggagagaaatctgctcaatcattaagttcagcagggtttcgatatgttgcattcaaatcctatgaagggattggtcattacacagttccaagagagatgggtgaagtttccacctggcttagttcaaggttgggacttgaaggattttcgtcgtaaacccagctttcttgtacaaagtggtgatatcacaagcccgggcggtcttctagggataacagggtaattatatccctctagatcacaagcccgggcggtcttctacgatgattgagtaataatgtgtcacgcatcaccatgggtggcagtgtcagtgtgagcaatgacctgaatgaacaattgaaatgaaaagaaaaaaagtactccatctgttccaaattaaaattcattttaaccttttaataggtttatacaataattgatatatgttttctgtatatgtctaatttgttatcatccgggcggtcttctagggataacagggtaattatatccctctaga

SEQ ID NO: 361 - DNA, 3319 bp, Oryza sativa
aatccgaaaagtttctgcaccgttttcaccccctaactaacaatatagggaacgtgtgctaaatataaaatgagaccttatatatgtagcgctgataactagaactatgcaagaaaaactcatccacctactttagtggcaatcgggctaaataaaaaagagtcgctacactagtttcgttttccttagtaattaagtgggaaaatgaaatcattattgcttagaatatacgttcacatctctgtcatgaagttaaattattcgaggtagccataattgtcatcaaactcttcttgaataaaaaaatctttctagctgaactcaatgggtaaagagagagattttttttaaaaaaatagaatgaagatattctgaacgtattggcaaagatttaaacatataattatataattttatagtttgtgcattcgtcatatcgcacatcattaaggacatgtcttactccatcccaatttttatttagtaattaaagacaattgacttatttttattatttatcttttttcgattagatgcaaggtacttacgcacacactttgtgctcatgtgcatgtgtgagtgcacctcctcaatacacgttcaactagcaacacatctctaatatcactcgcctatttaatacatttaggtagcaatatctgaattcaagcactccaccatcaccagaccacttttaataatatctaaaatacaaaaaataattttacagaatagcatgaaaagtatgaaacgaactatttaggtttttcacatacaaaaaaaaaaagaattttgctcgtgcgcgagcgccaatctcccatattgggcacacaggcaacaacagagtggctgcccacagaacaacccacaaaaaacgatgatctaacggaggacagcaagtccgcaacaaccttttaacagcaggctttgcggccaggagagaggaggagaggcaaagaaaaccaagcatcctcctcctcccatctataaattcctccccccttttcccctctctatataggaggcatccaagccaagaagagggagagcaccaaggacacgcgactagcagaagccgagcgaccgccttcttcgatccatatcttccggtcgagttcttggtcgatctcttccctcctccacctcctcctcacagggtatgtgcccttcggttgttcttggatttattgttctaggttgtgtagtacgggcgttgatgttaggaaaggggatctgtatctgtgatgattcctgttcttggatttgggatagaggggttcttgatgttgcatgttatcggttcggtttgattagtagtatggttttcaatcgtctggagagctctatggaaatgaaatggtttagggtacggaatcttgcgattttgtgagtaccttttgtttgaggtaaaatcagagcaccggtgattttgcttggtgtaataaaagtacggttgtttggtcctcgattctggtagtgatgcttctcgatttgacgaagctatcctttgtttattccctattgaacaaaaataatccaactttgaagacggtcccgttgatgagattgaatgattgattcttaagcctgtccaaaatttcgcagctggcttgtttagatacagtagtccccatcacgaaattcatggaaacagttataatcctcaggaacaggggattccctgttcttccgatttgctttagtcccagaattttttttcccaaatatcttaaaaagtcactttctggttcagttcaatgaattgattgctacaaataatgcttttatagcgttatcctagctgtagttcagttaataggtaatacccctatagtttagtcaggagaagaacttatccgatttctgatctccatttttaattatatgaaatgaactgtagcataagcagtattcatttggattattttttttattagctctcaccccttcattattctgagctgaaagtctggcatgaactgtcctcaattttgttttcaaattcacatcgattatctatgcattatcctcttgtatctacctgtagaagtttctttttggttattccttgactgcttgattacagaaagaaatttatgaagctgtaatcgggatagttatactgcttgttcttatgattcatttcctttgtgcagttcttggtgtagcttgccactttcaccagcaaagttcatttaaatcaactagggatatcacaagtttgtacaaaaaagcaggcttaaacatgagtcacgcgcattctcatatcggctccggtagtagaactactcgacgaacttttgaattcgggaagacacatgtagtgaggcctaaaggaaaacatcaagctactatagtttggttgcatggacttggtgataatggtttgagctcatctcagttgttggaatcacttccacttccaaatataaaatggatttgccctactgctcctacccgtcccgtggcgatacttggtggttttccctgcactgcatggtttgatgtgggagagctttcggaagatggtccagatgattgggagggtttagatgcttcagcagcacatattgctaacttgttgtcaacagagccagcagatgtgaaagttggtattggagggttcagcatgggtgcagcaatagcattatactctgcaacatgctatgccatgggaaggtatggaaatggcatcccatatcctgtcaatttaagagcagttgttggactcagtggttggcttccaggatcaaggagcttagggaacaagatagaagtgtcacatgaagcgagaaggcgagctgcttcattaccaattttacagtgtcacggaatcagtgatgatgtagtccactgtaagtatggagagaaatctgctcaatcattaagttcagcagggtttcgatatgttgcattcaaatcctatgaagggattggtcattacacagttccaagagagatgggtgaagtttccacctggcttagttcaaggttgggacttgaaggattttcgtcgtaaacccagctttcttgtacaaagtggtgatatcacaagcccgggcggtcttctagggataacagggtaattatatccctctagatcacaagcccgggcggtcttctacgatgattgagtaataatgtgtcacgcatcaccatgggtggcagtgtcagtgtgagcaatgacctgaatgaacaattgaaatgaaaagaaaaaaagtactccatctgttccaaattaaaattcattttaaccttttaataggtttatacaataattgatatatgttttctgtatatgtctaatttgttatcatcc

SEQ ID NO: 362 - DNA, 54 bp, Artificial sequence
  primer: prm15409
ggggacaagtttgtacaaaaaagcaggcttaaacaatgagtcacgcgcattctc

SEQ ID NO: 363 - DNA, 53 bp, Artificial sequence
  primer: prm15410
ggggaccactttgtacaagaaagctgggtaaaatagttttgtcatttacgacg

SEQ ID NO: 364 - DNA, 56 bp, Artificial sequence
  primer: prm15411
ggggacaagtttgtacaaaaaagcaggcttaaacaatgagctattctcgtcaaagc

SEQ ID NO: 365 - DNA, 50 bp, Artificial sequence
  primer: prm15412
ggggaccactttgtacaagaaagctgggttgctgagaagatgcttgtaaa

1-78. (canceled)

79. A method for enhancing yield-related traits in plants relative to corresponding control plants, comprising modulating expression in a plant of a nucleic acid encoding one of:
a. a DUF642 polypeptide, wherein said DUF642 polypeptide comprises an InterPro accession IPR006946DUF642 domain, and/or the signature sequence FSAARTCAQ (SEQ ID NO: 194);
b. an epimerase-related like polypeptide, wherein said epimerase-related like polypeptide comprises one or more of the following motifs:

| (i) | Motif 7: |
|---|---|
| (SEQ ID NO: 273) | |
| | CREEGV[DE][QK]VFVD[AG]AH[AS]IG[QSC]V[PDE][VI][DN][VM][KR][E |
| | D]IGADFY[TV]SNLHKWFFCPP[SA]VAFL[YH], |
| (ii) | Motif 8: |
| (SEQ ID NO: 274) | |
| | EF[SA]HH[DN]P[GAN]VAR[IV]NNGSFG[CS]CP[AG]S[VI][LI]AAQ[ARK] |
| | [RN]WQ[LR][LRQ]FL[RQA]QPD[AD]FYF[ND]xL[QRK][PK]G, |
| (iii) | Motif 9: |
| (SEQ ID NO: 275) | |
| | S[LI]VDNATTAAAIVLQ[HQ][VAI][AG][WR][AS]FAEG[RKN]FA[KR][GN] |
| | D[AVT]V[LV]MLH[YC]AY[GQ][AS]VKKSI[EQH]AYV; |

or
c. a Phospholipase/carboxylesterase (PLPCase) polypeptide, wherein said PLPCase polypeptide comprises an InterPro accession IPR003140 corresponding to PFAM accession number PF022030 Phospholipase/carboxylesterase (PLPCase) domain.

80. The method according to claim 79, wherein said modulated expression is effected by introducing and expressing in a plant a nucleic acid encoding said DUF642 polypeptide, said epimerase-related like polypeptide, or said PLPCase polypeptide.

81. The method according to claim 79, wherein said enhanced yield-related traits comprise increased yield, increased greenness index, increased biomass, and/or increased seed yield relative to corresponding control plants.

82. The method according to claim 79, wherein said enhanced yield-related traits are obtained under non-stress conditions or under an abiotic stress condition, wherein the abiotic stress condition is one of drought stress, salt stress or nitrogen deficiency.

83. The method according to claim 79,
a. wherein said DUF642 polypeptide comprises one or more of the following motifs:

| (SEQ ID NO: 181) | | |
|---|---|---|
| (i) | Motif 1: | N[LAM][VL]KNG[DG]FEEGP[WYH][MI][FLI]P[NG][TS][STR][WL] |
| | | GVL[LVI]P[PTS][NKM][LQDV][EDV][DE][ED][THY]S[PS]L[PS][GP]W[I |
| | | MT][IV], |
| (SEQ ID NO: 182) | | |
| (ii) | Motif 2: | [VLA][EKAT][KPR]G[SAM][LRH]Y[SA][LIV][TI]F[SG]A[AS]RTC |
| | | AQ[DLAS]E[SVRL]L[NR][VI], |
| (SEQ ID NO: 183) | | |
| (iii) | Motif 3: | D[PE][AT]CGP[LI][IL]D[AS][VIF]AI[KR]; |

b. wherein said epimerase-related like polypeptide has at least 40% overall sequence identity to the amino acid of SEQ ID NO: 198 and/or comprises a conserved domain with at least 50% sequence identity to a conserved domain as represented by any one of:
amino acid residues 32 to 449 of SEQ ID NO: 198 (motif 10);
amino acid residues 47 to 276 of SEQ ID NO: 198 (motif 11);
amino acid residues 92 to 364 of SEQ ID NO: 198 (motif 12); and
amino acid residues 59 to 323 of SEQ ID NO: 198 (motif 13); or
c. wherein said PLPCase polypeptide comprises one or more of the following motifs:

| (i) | Motif 14: |
|---|---|
| (SEQ ID NO: 348) | |
| | E[FY]G[KR]T[HY]VVRPKG[KR]HQATIVWLHGLGDNG[LSA]S[SW]SQ |
| | LL [ED][ST]LPLPNIKWICPTA, |
| (ii) | Motif 15: |
| (SEQ ID NO: 349) | |
| | PDD[WIVL]EGLDASAAH[IV]ANLLS[TS]EP[AS]D[VI]K[VL]G[IV]G, |
| (iii) | Motif 16: |
| (SEQ ID NO: 350) | |
| | FSMGAA[IT]ALYSA[TA]C[YF]A[MHL]. |

84. The method according to claim 79, wherein said nucleic acid is of plant origin, from a monocotyledonous plant, or from a dicotyledonous plant.

85. The method according to claim 79, wherein said nucleic acid encodes any one of the polypeptides listed in Table A1, A2 or A3, or is a portion of such a nucleic acid, or a nucleic acid capable of hybridizing with such a nucleic acid.

86. The method according to claim 79, wherein said nucleic acid sequence encodes an orthologue or paralogue of any of the polypeptides given in Table A1, A2 or A3.

87. The method according to claim 79, wherein said nucleic acid encodes:
(i) the polypeptide of SEQ ID NO: 2 or SEQ ID NO: 4;
(ii) a polypeptide having at least 90% sequence identity to the polypeptide of SEQ ID NO: 2 and/or SEQ ID NO: 4; or
(iii) the polypeptide of SEQ ID NO: 285.

88. The method according to claim 79, wherein said nucleic acid is operably linked to a constitutive promoter, a medium strength constitutive promoter, a plant promoter, a GOS2 promoter, or a GOS2 promoter from rice.

89. A plant, plant part thereof, including seeds, or plant cell, obtained by the method according to claim 79, wherein said plant, plant part or plant cell comprises a recombinant nucleic acid as defined in claim 79.

90. A construct comprising:
(i) the nucleic acid as defined in claim 79;
(ii) one or more control sequences capable of driving expression of the nucleic acid sequence of (i); and optionally
(iii) a transcription termination sequence.

91. The construct according to claim 90, wherein one of said control sequences is a constitutive promoter, a medium strength constitutive promoter, a plant promoter, a GOS2 promoter, or a GOS2 promoter from rice.

92. A method for making plants having enhanced yield-related traits, increased yield, increased greenness index, increased seed yield, and/or increased biomass, relative to corresponding control plants, comprising transforming a plant with the construct according to claim 90.

93. A plant, plant part, or plant cell transformed with the construct according to claim 90.

94. A method for the production of a transgenic plant having enhanced yield-related traits increased yield, increased seed yield, increased biomass, and/or increased greenness index, relative to corresponding control plants, comprising:
(i) introducing and expressing in a plant cell or plant a nucleic acid encoding a polypeptide as defined in claim 79; and
(ii) cultivating said plant cell or plant under conditions promoting plant growth and development.

95. A transgenic plant having enhanced yield-related traits, increased yield, increased seed yield and/or increased biomass, relative to corresponding control plants, resulting from modulated expression of a nucleic acid encoding a polypeptide as defined in claim 79, or a transgenic plant cell derived from said transgenic plant.

96. The plant according to claim 89, or a plant cell derived therefrom, wherein said plant is a crop plant, beet, sugarbeet, alfalfa, a monocotyledonous plant, sugarcane, a cereal, rice, maize, wheat, barley, millet, rye, triticale, sorghum, emmer, spelt, einkorn, teff, milo or oats.

97. Harvestable parts of the plant according to claim 96, wherein said harvestable parts are shoot biomass, root biomass, and/or seeds.

98. Products derived from the plant according to claim 96 and/or from harvestable parts of said plant.

99. An isolated nucleic acid molecule selected from:
(i) the nucleic acid of SEQ ID NO: 199;
(ii) the complement of the nucleic acid of SEQ ID NO: 199;
(iii) a nucleic acid encoding an epimerase-related like polypeptide having at least 50% sequence identity to the amino acid sequence of SEQ ID NO: 200, and additionally or alternatively comprising one or more motifs having at least 50% or more sequence identity to any one or more of the motifs 7 to 13, and conferring enhanced yield-related traits relative to corresponding control plants.
(iv) a nucleic acid molecule which hybridizes with the nucleic acid molecule of (i) to (iii) under high stringency hybridization conditions and confers enhanced yield-related traits relative to control plants.

100. An isolated polypeptide selected from:
(i) the amino acid sequence of SEQ ID NO: 200;
(ii) an amino acid sequence having at least 50% sequence identity to the amino acid sequence of SEQ ID NO: 200, and additionally or alternatively comprising one or more motifs having at least 50% sequence identity to any one or more of the motifs 7 to 13, and conferring enhanced yield-related traits relative to control plants;
(iii) derivatives of any of the amino acid sequences of (i) or (ii) above.

101. A method for the production of a product comprising the steps of growing the plants according to claim 89 and producing said product from or by
a. the plants according to claim 89; or
b. parts, including seeds, of these plants.

102. A plant cell comprising the construct according to claim 90.

103. A recombinant chromosomal DNA comprising the construct according to claim 90.
